(19) United States
(12) Patent Application Publication
(10) Pub. No.: US 2024/0191197 A1
(43) Pub. Date: Jun. 13, 2024

(54) MODIFIED CELLS AND METHODS FOR THE TREATMENT OF HEMOGLOBINOPATHIES

(71) Applicant: EDITAS MEDICINE, INC., Cambridge, MA (US)

(72) Inventors: Jennifer Leah GORI, Jamaica Plain, MA (US); Edouard AUPEPIN DE LAMOTHE-DREUZY, Boston, MA (US); Jack HEATH, Winchester, MA (US); John Anthony ZURIS, Boston, MA (US); KaiHsin CHANG, Medfield, MA (US)

(73) Assignee: EDITAS MEDICINE, INC., Cambridge, MA (US)

(21) Appl. No.: 17/757,069

(22) PCT Filed: Dec. 9, 2020
(86) PCT No.: PCT/US2020/063854

§ 371 Date: Jun. 8, 2022

Related U.S. Application Data
(60) Provisional application No. 62/945,190, filed on Dec. 8, 2019.
(60) Provisional application No. 63/115,518, filed on Nov. 18, 2020.

(51) Int. Cl. C12N 5/0789; A61K 35/28; A61P 7/06; C12N 9/22; C12N 15/11

(52) U.S. Cl. CPC C12N 5/0647; A61K 35/28; A61P 7/06; C12N 9/22; C12N 15/111; C12N 2310/20; C12N 2310/315; C12N 2510/00

(57) ABSTRACT

Genome editing systems, guide RNAs, and CRISPR-mediated methods are provided for altering portions of the HBG1 and HBG2 loci in cells and increasing expression of fetal hemoglobin.

### PRIORITY CLAIM

[0001] This application is a U.S. national phase application of International Patent Application No. PCT/US2020/063854, filed Dec. 9, 2020, which claims the benefit of U.S. Provisional Patent Application No. 62/945,190, filed Dec. 8, 2019, and U.S. Provisional Patent Application No. 63/115,518, filed Nov. 18, 2020, all of which are incorporated herein by reference in their entirety, including drawings.

### SEQUENCE LISTING

[0002] This application contains a Sequence Listing, which was submitted in ASCII format via Patent Center, and is hereby incorporated by reference in its entirety. The ASCII copy, created on Jun. 7, 2022, is named SequenceListing.txt and is 699 KB in size.

### FIELD

[0003] This disclosure relates to genome editing systems and methods for altering a target nucleic acid sequence, or modulating expression of a target nucleic acid sequence, and applications thereof in connection with the alteration of genes encoding hemoglobin subunits and/or treatment of hemoglobinopathies.

### BACKGROUND

[0004] Hemoglobin (Hb) carries oxygen in erythrocytes or red blood cells (RBCs) from the lungs to tissues. During prenatal development and until shortly after birth, hemoglobin is present in the form of fetal hemoglobin (HbF), a tetrameric protein composed of two alpha (α)-globin chains and two gamma (γ)-globin chains. HbF is largely replaced by adult hemoglobin (HbA), a tetrameric protein in which the γ-globin chains of HbF are replaced with beta (β)-globin chains, through a process known as globin switching. The average adult makes less than 1% HbF out of total hemoglobin (Thein 2009). The α-hemoglobin gene is located on chromosome 16, while the β-hemoglobin gene (HBB), A gamma (Aγ)-globin chain (HBG1, also known as gamma globin A), and G gamma (Gγ)-globin chain (HBG2, also known as gamma globin G) are located on chromosome 11 within the globin gene cluster (also referred to as the globin locus).

[0005] Mutations in HBB can cause hemoglobin disorders (i.e., hemoglobinopathies) including sickle cell disease (SCD) and beta-thalassemia (β-Thal). Approximately 93,000 people in the United States are diagnosed with a hemoglobinopathy. Worldwide, 300,000 children are born with hemoglobinopathies every year (Angastiniotis 1998). Because these conditions are associated with HBB mutations, their symptoms typically do not manifest until after globin switching from HbF to HbA.

[0006] SCD is the most common inherited hematologic disease in the United States, affecting approximately 80,000 people (Brousseau 2010). SCD is most common in people of African ancestry, for whom the prevalence of SCD is 1 in 500. In Africa, the prevalence of SCD is 15 million (Aliyu 2008). SCD is also more common in people of Indian, Saudi Arabian and Mediterranean descent. In those of Hispanic-American descent, the prevalence of sickle cell disease is 1 in 1,000 (Lewis 2014).

[0007] SCD is caused by a single homozygous mutation in the HBB gene, c.17A>T (HbS mutation). The sickle mutation is a point mutation (GAG>GTG) on HBB that results in substitution of valine for glutamic acid at amino acid position 6 in exon 1. The valine at position 6 of the β-hemoglobin chain is hydrophobic and causes a change in conformation of the β-globin protein when it is not bound to oxygen. This change of conformation causes HbS proteins to polymerize in the absence of oxygen, leading to deformation (i.e., sickling) of RBCs. SCD is inherited in an autosomal recessive manner, so that only patients with two HbS alleles have the disease. Heterozygous subjects have sickle cell trait, and may suffer from anemia and/or painful crises if they are severely dehydrated or oxygen deprived.

[0008] Sickle shaped RBCs cause multiple symptoms, including anemia, sickle cell crises, vaso-occlusive crises, aplastic crises, and acute chest syndrome. Sickle shaped RBCs are less elastic than wild-type RBCs and therefore cannot pass as easily through capillary beds and cause occlusion and ischemia (i.e., vaso-occlusion). Vaso-occlusive crisis occurs when sickle cells obstruct blood flow in the capillary bed of an organ leading to pain, ischemia, and necrosis. These episodes typically last 5-7 days. The spleen plays a role in clearing dysfunctional RBCs, and is therefore typically enlarged during early childhood and subject to frequent vaso-occlusive crises. By the end of childhood, the spleen in SCD patients is often infarcted, which leads to autosplenectomy. Hemolysis is a constant feature of SCD and causes anemia. Sickle cells survive for 10-20 days in circulation, while healthy RBCs survive for 90-120 days. SCD subjects are transfused as necessary to maintain adequate hemoglobin levels. Frequent transfusions place subjects at risk for infection with HIV, Hepatitis B, and Hepatitis C. Subjects may also suffer from acute chest crises and infarcts of extremities, end organs, and the central nervous system.

[0009] Subjects with SCD have decreased life expectancies. The prognosis for patients with SCD is steadily improving with careful, life-long management of crises and anemia. As of 2001, the average life expectancy of subjects with sickle cell disease was the mid-to-late 50's. Current treatments for SCD involve hydration and pain management during crises, and transfusions as needed to correct anemia.

[0010] Thalassemias (e.g., β-Thal, δ-Thal, and β/δ-Thal) cause chronic anemia. β-Thal is estimated to affect approximately 1 in 100,000 people worldwide. Its prevalence is higher in certain populations, including those of European descent, where its prevalence is approximately 1 in 10,000. β-Thal major, the more severe form of the disease, is life-threatening unless treated with lifelong blood transfusions and chelation therapy. In the United States, there are approximately 3,000 subjects with β-Thal major. β-Thal intermedia does not require blood transfusions, but it may cause growth delay and significant systemic abnormalities, and it frequently requires lifelong chelation therapy. Although HbA makes up the majority of hemoglobin in adult RBCs, approximately 3% of adult hemoglobin is in the form of HbA2, an HbA variant in which the two γ-globin chains are replaced with two delta (Δ)-globin chains. δ-Thal is associated with mutations in the A hemoglobin gene (HBD) that cause a loss of HBD expression. Co-inheritance of the HBD mutation can mask a diagnosis of β-Thal (i.e., β/δ-Thal) by decreasing the level of HbA2 to the normal range (Bouva 2006). β/δ-Thal is usually caused by deletion of the HBB and HBD sequences in both alleles. In homozygous (δo/δo βo/βo) patients, HBG is expressed, leading to production of HbF alone.

[0011] Like SCD, β-Thal is caused by mutations in the HBB gene. The most common HBB mutations leading to β-Thal are: c.−136C>G, c.92+1G>A, c.92+6T>C, c.93-21G>A, c.118C>T, c.316-106C>G, c.25_26delAA, c.27_28insG, c.92+5G>C, c.118C>T, c.135delC, c.315+1G>A, c.−78A>G, c.52A>T, c.59A>G, c.92+5G>C, c.124_127delTTCT, c.316-197C>T, c.−78A>G, c.52A>T, c.124_127delTTCT, c.316-197C>T, c.−138C>T, c.−79A>G, c.92+5G>C, c.75T>A, c.316-2A>G, and c.316-2A>C. These and other mutations associated with β-Thal cause mutated or absent β-globin chains, which causes a disruption of the normal Hb α-hemoglobin to β-hemoglobin ratio. Excess α-globin chains precipitate in erythroid precursors in the bone marrow.

[0012] In β-Thal major, both alleles of HBB contain nonsense, frameshift, or splicing mutations that leads to complete absence of β-globin production (denoted β⁰/β⁰). β-Thal major results in severe reduction in β-globin chains, leading to significant precipitation of α-globin chains in RBCs and more severe anemia.

[0013] β-Thal intermedia results from mutations in the 5′ or 3′ untranslated region of HBB, mutations in the promoter region or polyadenylation signal of HBB, or splicing mutations within the HBB gene. Patient genotypes are denoted βo/β+ or β+/β+. βo represents absent expression of a β-globin chain; β+ represents a dysfunctional but present β-globin chain. Phenotypic expression varies among patients. Since there is some production of β-globin, β-Thal intermedia results in less precipitation of α-globin chains in the erythroid precursors and less severe anemia than β-Thal major. However, there are more significant consequences of erythroid lineage expansion secondary to chronic anemia.

[0014] Subjects with β-Thal major present between the ages of 6 months and 2 years, and suffer from failure to thrive, fevers, hepatosplenomegaly, and diarrhea. Adequate treatment includes regular transfusions. Therapy for β-Thal major also includes splenectomy and treatment with hydroxyurea. If patients are regularly transfused, they will develop normally until the beginning of the second decade. At that time, they require chelation therapy (in addition to continued transfusions) to prevent complications of iron overload. Iron overload may manifest as growth delay or delay of sexual maturation. In adulthood, inadequate chelation therapy may lead to cardiomyopathy, cardiac arrhythmias, hepatic fibrosis and/or cirrhosis, diabetes, thyroid and parathyroid abnormalities, thrombosis, and osteoporosis. Frequent transfusions also put subjects at risk for infection with HIV, hepatitis B and hepatitis C.

[0015] β-Thal intermedia subjects generally present between the ages of 2-6 years. They do not generally require blood transfusions. However, bone abnormalities occur due to chronic hypertrophy of the erythroid lineage to compensate for chronic anemia. Subjects may have fractures of the long bones due to osteoporosis. Extramedullary erythropoiesis is common and leads to enlargement of the spleen, liver, and lymph nodes. It may also cause spinal cord compression and neurologic problems. Subjects also suffer from lower extremity ulcers and are at increased risk for thrombotic events, including stroke, pulmonary embolism, and deep vein thrombosis. Treatment of β-Thal intermedia includes splenectomy, folic acid supplementation, hydroxyurea therapy, and radiotherapy for extramedullary masses. Chelation therapy is used in subjects who develop iron overload.

[0016] Life expectancy is often diminished in β-Thal patients. Subjects with β-Thal major who do not receive transfusion therapy generally die in their second or third decade. Subjects with β-Thal major who receive regular transfusions and adequate chelation therapy can live into their fifth decade and beyond. Cardiac failure secondary to iron toxicity is the leading cause of death in β-Thal major subjects due to iron toxicity.

[0017] A variety of new treatments are currently in development for SCD and β-Thal. Delivery of an anti-sickling HBB gene via gene therapy is currently being investigated in clinical trials. However, the long-term efficacy and safety of this approach is unknown. Transplantation with hematopoietic stem cells (HSCs) from an HLA-matched allogeneic stem cell donor has been demonstrated to cure SCD and β-Thal, but this procedure involves risks including those associated with ablation therapy, which is required to prepare the subject for transplant, increases risk of life-threatening opportunistic infections, and risk of graft vs. host disease after transplantation. In addition, matched allogeneic donors often cannot be identified. Thus, there is a need for improved methods of managing these and other hemoglobinopathies.

### SUMMARY

[0018] Provided herein in certain embodiments are first populations of modified cells comprising a plurality of modified CD34+ or hematopoietic stem cells with one or more indels in an HBG gene promoter. In certain of these embodiments, the plurality of modified cells include an indel in a CCAAT box target region.

[0019] In certain embodiments of the first populations of modified cells provided herein, one or more of the cells in the plurality of modified cells include a HBG1/2 c.−104 to −121 deletion in a HBG1 promoter, an HBG2 promoter, or both. In certain of these embodiments, HBG1/2 c.−104 to −121 deletions make up 1% or more, 1.5% or more, 2% or more, 2.5% or more. 3% or more, 3.5% or more, 4% or more, 4.5% or more, 5% or more, 5.5% or more, 6% or more, 6.5% or more, 7% or more, 7.5% or more, 8% or more, 8.5% or more, 9% or more, 9.5% or more, 10% or more, 10.5% or more, 11% or more, 11.5% or more, 12% or more, 12.5% or more, 13% or more, 13.5% or more, 14% or more, 14.5% or more, 15% or more, or 15.5% or more of the indels in the plurality of modified cells as a whole. In certain of these embodiments, HBG1/2 c.−104 to −121 deletions make up less than 25% of the indels in the plurality of modified cells as a whole.

[0020] In certain embodiments of the first populations of modified cells provided herein, 60% or more, 65% or more, 70% or more, 75% or more, 80% or more, 85% or more, 90% or more, or 95% or more of the indels in the plurality of modified cells as a whole are deletions of at least 4 base pairs.

[0021] In certain embodiments of the first populations of modified cells provided herein, 25% or more, 30% or more, 35% or more, 40% or more, 45% or more, 50% or more, 55% or more, 60% or more, or 65% or more of the indels in the plurality of modified cells as a whole are deletions of at least 4 base pairs introduced by a repair mechanism other than microhomology-mediated end joining (MMEJ) repair.

[0022] In certain embodiments of the first populations of modified cells provided herein, 25% or more, 30% or more, 35% or more, 40% or more, 45% or more, 50% or more, 55% or more, 60% or more, or 65% or more of the indels in the plurality of modified cells as a whole are deletions of at least 4 base pairs introduced by non-homologous end joining (NHEJ) repair, e.g., canonical NHEJ repair.

[0023] In certain embodiments of the first populations of modified cells provided herein, 50% or more, 55% or more, 60% or more, 65% or more, 70% or more, 75% or more, 80% or more, 85% or more, 90% or more, or 92% or more of the indels in the plurality of modified cells as a whole are deletions of 1 to 25 base pairs.

[0024] In certain embodiments of the first populations of modified cells provided herein, 50% or more, 55% or more, 60% or more, 65% or more, 70% or more, 75% or more, 80% or more, or 85% or more of the indels in the plurality of modified cells as a whole are deletions of 3 to 25 base pairs.

[0025] In certain embodiments of the first populations of modified cells provided herein, 50% or more, 55% or more, 60% or more, 65% or more, 70% or more, 75% or more, or 80% or more of the indels in the plurality of modified cells as a whole are deletions of 4 to 25 base pairs.

[0026] In certain embodiments of the first populations of modified cells provided herein, 50% or more, 55% or more, 60% or more, 65% or more, 70% or more, or 72% or more of the indels in the plurality of modified cells as a whole are deletions of 5 to 25 base pairs.

[0027] In certain embodiments of the first populations of modified cells provided herein, the modified cells are produced by delivering a first RNP complex including a first gRNA comprising a first gRNA targeting domain and a Cpf1 RNA-guided nuclease or a modified Cpf1 RNA-guided nuclease to a first population of unmodified cells comprising a plurality of unmodified CD34+ or hematopoietic stem cells to generate indels. In certain of these embodiments, the first RNP complex is delivered to the first population of unmodified cells by electroporation. In certain embodiments, the first population of unmodified cells is from a subject having sickle cell disease. In certain embodiments, the first gRNA includes a 5′ end and a 3′ end, with a DNA extension at the 5′ end and a 2′-O-methyl-3′-phosphorothioate modification at the 3′ end. In certain of these embodiments, the DNA extension at the 5′ end comprises a sequence set forth in any of SEQ ID NOs:1235-1250. In certain embodiments, the first gRNA targeting domain comprises the sequence set forth in SEQ ID NO:1254. In certain embodiments, the first gRNA comprises the sequence set forth in SEQ ID NO:1051. In certain embodiments, the modified Cpf1 RNA-guided nuclease comprises the sequence set forth in SEQ ID NO:1097. In certain embodiments, the first population of modified cells has higher fetal hemoglobin (HbF) levels than the first population of unmodified cells.

[0028] In certain embodiments of the first populations of modified cells provided herein, one or more of the cells in the plurality of modified cells include (a) a HBG1/2 c.−104 to −121 deletion in a HBG1 promoter, an HBG2 promoter, or both; (b) a HBG1/2 c.−110 to −115 deletion in a HBG1 promoter, an HBG2 promoter, or both; (c) a HBG1/2 c.−112 to −115 deletion in a HBG1 promoter, an HBG2 promoter, or both; (d) a HBG1/2 c.−113 to −115 deletion in a HBG1 promoter, an HBG2 promoter, or both; (e) a HBG1/2 c.−111 to −115 deletion in a HBG1 promoter, an HBG2 promoter, or both; (f) a HBG1/2 c.−111 to −117 deletion in a HBG1 promoter, an HBG2 promoter, or both; (g) a HBG1/2 c.−102 to −114 deletion in a HBG1 promoter, an HBG2 promoter, or both; (h) a HBG1/2 c.−114 to −118 deletion in a HBG1 promoter, an HBG2 promoter, or both; (i) a HBG1/2 c.−112 to −116 deletion in a HBG1 promoter, an HBG2 promoter, or both; or j) a HBG1/2 c.−113 to −117 deletion in a HBG1 promoter, an HBG2 promoter, or both.

[0029] In certain embodiments of the first populations of modified cells provided herein, the plurality of modified cells as a whole includes (a) a HBG1/2 c.−104 to −121 deletion in a HBG1 promoter, an HBG2 promoter, or both and (b) a HBG1/2 c.−110 to −115 deletion in a HBG1 promoter, an HBG2 promoter, or both. In certain embodiments, HBG1/2 c.−104 to −121 deletions make up 1% or more, 1.5% or more, 2% or more, 2.5% or more. 3% or more, 3.5% or more, 4% or more, 4.5% or more, 5% or more, 5.5% or more, 6% or more, 6.5% or more, 7% or more, 7.5% or more, 8% or more, 8.5% or more, 9% or more, 9.5% or more, 10% or more, 10.5% or more, 11% or more, 11.5% or more, 12% or more, 12.5% or more, 13% or more, 13.5% or more, 14% or more, 14.5% or more, or 15% or more of the indels in the plurality of modified cells as a whole. In certain embodiments, HBG1/2 c.−104 to −121 deletions make up 1% to 15.5% of the indels in the plurality of modified cells as a whole. In certain embodiments, HBG1/2 c.−110 to −115 deletions make up 0.5% or more, 1% or more, 1.5% or more, 2% or more, 2.5% or more. 3% or more, 3.5% or more, 4% or more, 4.5% or more, 5% or more, or 5.5% or more of the indels in the plurality of modified cells as a whole. In certain embodiments, HBG1/2 c.−110 to −115 deletions make up 0.5% to 6% of the indels in the plurality of modified cells as a whole.

[0030] In certain embodiments of the first populations of modified cells provided herein, the plurality of modified cells as a whole include (a) a HBG1/2 c.−104 to −121 deletion in a HBG1 promoter, an HBG2 promoter, or both; (b) a HBG1/2 c.−110 to −115 deletion in a HBG1 promoter, an HBG2 promoter, or both; (c) a HBG1/2 c.−112 to −115 deletion in a HBG1 promoter, an HBG2 promoter, or both; (d) a HBG1/2 c.−113 to −115 deletion in a HBG1 promoter, an HBG2 promoter, or both; (e) a HBG1/2 c.−111 to −115 deletion in a HBG1 promoter, an HBG2 promoter, or both; (f) a HBG1/2 c.−111 to −117 deletion in a HBG1 promoter, an HBG2 promoter, or both; (g) a HBG1/2 c.−102 to −114 deletion in a HBG1 promoter, an HBG2 promoter, or both; (h) a HBG1/2 c.−114 to −118 deletion in a HBG1 promoter, an HBG2 promoter, or both; (i) a HBG1/2 c.−112 to −116 deletion in a HBG1 promoter, an HBG2 promoter, or both; and (j) a HBG1/2 c.−113 to −117 deletion in a HBG1 promoter, an HBG2 promoter, or both. In certain embodiments, the HBG1/2 c.−104 to −121 deletions make up 1% or more, 1.5% or more, 2% or more, 2.5% or more. 3% or more, 3.5% or more, 4% or more, 4.5% or more, 5% or more, 5.5% or more, 6% or more, 6.5% or more, 7% or more, 7.5% or more, 8% or more, 8.5% or more, 9% or more, 9.5% or more, 10% or more, 10.5% or more, 11% or more, 11.5% or more, 12% or more, 12.5% or more, 13% or more, 13.5% or more, 14% or more, 14.5% or more, or 15% or more of the indels in the plurality of modified cells as a whole. In certain embodiments, the HBG1/2 c.−104 to −121 deletions make up 1% to 15.5% of the indels in the plurality of modified cells as a whole. In certain embodiments, the HBG1/2 c.−110 to −115 deletions make up 0.5% or more, 1% or more, 1.5% or more, 2% or more, 2.5% or more. 3% or more, 3.5% or more, 4% or more, 4.5% or more, 5% or more, or 5.5% or more of the indels in the plurality of modified cells as a whole. In certain embodiments, HBG1/2 c.−110 to −115 deletions make up 0.5% to 6% of the indels in the plurality of modified cells as a whole. In certain embodiments, the HBG1/2 c.−112 to −115 deletions make up 0.5% or more, 1% or more, 1.5% or more, 2% or more, 2.5% or more. 3% or more, 3.5% or more, 4% or more, 4.5% or more, 5% or more, or 5.5% or more of the indels in the plurality of modified cells as a whole. In certain embodiments, HBG1/2 c.−112 to −115 deletions make up 0.5% to 6% of the indels in the plurality of modified cells as a whole. In certain embodiments, the HBG1/2 c.−113 to −115 deletions make up 0.5% or more, 1% or more, 1.5% or more, 2% or more, 2.5% or more. 3% or more, 3.5% or more, 4% or more, 4.5% or more, 5% or more, or 5.5% or more of the indels in the plurality of modified cells as a whole. In certain embodiments, HBG1/2 c.−113 to −115 deletions make up 0.5% to 6% of the indels in the plurality of modified cells as a whole. In certain embodiments, the HBG1/2 c.−111 to −115 deletions make up 0.5% or more, 1% or more, 1.5% or more, 2% or more, 2.5% or more. 3% or more, 3.5% or more, 4% or more, 4.5% or more, 5% or more, or 5.5% or more of the indels in the plurality of modified cells as a whole. In certain embodiments, HBG1/2 c.−111 to −115 deletions make up 0.5% to 6% of the indels in the plurality of modified cells as a whole. In certain embodiments, the HBG1/2 c.−111 to −117 deletions make up 0.5% or more, 1% or more, 1.5% or more, 2% or more, 2.5% or more. 3% or more, 3.5% or more, 4% or more, 4.5% or more, 5% or more, or 5.5% or more of the indels in the plurality of modified cells as a whole. In certain embodiments, HBG1/2 c.−111 to −117 deletions make up 0.5% to 6% of the indels in the plurality of modified cells as a whole. In certain embodiments, the HBG1/2 c.−102 to −114 deletions make up 0.5% or more, 1% or more, 1.5% or more, 2% or more, 2.5% or more. 3% or more, 3.5% or more, 4% or more, 4.5% or more, 5% or more, or 5.5% or more of the indels in the plurality of modified cells as a whole. In certain embodiments, HBG1/2 c.−102 to −114 deletions make up 0.5% to 6% of the indels in the plurality of modified cells as a whole. In certain embodiments, the HBG1/2 c.−114 to −118 deletions make up 0.5% or more, 1% or more, 1.5% or more, 2% or more, 2.5% or more. 3% or more, 3.5% or more, 4% or more, 4.5% or more, 5% or more, or 5.5% or more of the indels in the plurality of modified cells as a whole. In certain embodiments, HBG1/2 c.−114 to −118 deletions make up 0.5% to 6% of the indels in the plurality of modified cells as a whole. In certain embodiments, the HBG1/2 c.−112 to −116 deletions make up 0.5% or more, 1% or more, 1.5% or more, 2% or more, 2.5% or more. 3% or more, 3.5% or more, 4% or more, 4.5% or more, 5% or more, or 5.5% or more of the indels in the plurality of modified cells as a whole. In certain embodiments, HBG1/2 c.−112 to −116 deletions make up 0.5% to 6% of the indels in the plurality of modified cells as a whole. In certain embodiments, the HBG1/2 c.−113 to −117 deletions make up 0.5% or more, 1% or more, 1.5% or more, 2% or more, 2.5% or more. 3% or more, 3.5% or more, 4% or more, 4.5% or more, 5% or more, or 5.5% or more of the indels in the plurality of modified cells as a whole. In certain embodiments, HBG1/2 c.−113 to −117 deletions make up 0.5% to 6% of the indels in the plurality of modified cells as a whole.

[0031] In certain embodiments of the first populations of modified cells provided herein, the plurality of modified cells as a whole includes the 108 deletions present in all 14 samples in Table 25.

[0032] In certain embodiments of the first populations of modified cells provided herein, the plurality of modified cells as a whole includes the indels identified as having an “Ave % in Indel” of 0.1% or more in Table 25. In certain of these embodiments, the plurality of modified cells as a whole includes all of the indels in Table 25.

[0033] In certain embodiments of the first populations of modified cells provided herein, the plurality of modified cells as a whole include at least 10% more deletions of at least 4 base pairs than a second population of modified cells comprising a plurality of modified CD34+ or hematopoietic stem cells comprising a plurality of modified CD34+ or hematopoietic stem cells with one or more indels in an HBG gene promoter, where the indels of the second population of modified cells are generated by delivering a second RNP complex including a second gRNA having a gRNA targeting domain comprising SEQ ID NO:339 and a Cas9 RNA-guided nuclease to a second population of unmodified cells comprising a plurality of unmodified CD34+ or hematopoietic stem cells. In certain of these embodiments, the second RNP complex is delivered to the second population of unmodified cells by electroporation. In certain embodiments, the second population of unmodified cells is from a subject having sickle cell disease. In certain embodiments, the first population of modified cells has higher HbF levels than the second population of modified cells. In certain of these embodiments, the plurality of modified cells in the second population include an indel in a CCAAT box target region.

[0034] Provided herein in certain embodiments are methods of inducing expression of HbF in a first population of modified cells comprising a plurality of modified CD34+ or hematopoietic stem cells with one or more indels in an HBG gene promoter, the method comprising delivering a first RNP complex including a first gRNA comprising a first gRNA targeting domain and a Cpf1 RNA-guided nuclease or a modified Cpf1 RNA-guided nuclease to a first population of unmodified cells comprising a plurality of unmodified CD34+ or hematopoietic stem cells to generate indels. In certain embodiments, 60% or more, 65% or more, 70% or more, 75% or more, 80% or more, 85% or more, 90% or more, or 95% or more of the resultant indels in the plurality of modified cells as a whole are deletions of at least 4 base pairs. In certain embodiments, the first population of modified cells exhibits increased HbF levels versus the first population of unmodified cells. In certain embodiments, the first RNP complex is delivered to the first population of unmodified cells by electroporation.

[0035] Provided herein in certain embodiments are methods of decreasing sickling in a first population of red blood cells (RBCs) cultured from a first population of modified cells comprising a plurality of modified CD34+ cells with one or more indels in an HBG gene promoter, the method comprising delivering a first RNP complex including a first gRNA comprising a first gRNA targeting domain and a Cpf1 RNA-guided nuclease or a modified Cpf1 RNA-guided nuclease to a first population of unmodified cells comprising a plurality of unmodified CD34+ cells to generate indels, then culturing the first population of RBCs from the first population of modified cells. In certain embodiments, 60% or more, 65% or more, 70% or more, 75% or more, 80% or more, 85% or more, 90% or more, or 95% or more of the resultant indels in the plurality of modified cells as a whole are deletions of at least 4 base pairs. In certain embodiments, the first population of RBCs exhibits significantly decreased sickling upon deoxygenation versus a second population of RBCs cultured from the first population of unmodified cells. In certain embodiments, the first population of RBCs sickle at a significantly lower oxygen tension, for example as measured by relative oxygen pressure, than the second population of RBCs. In certain embodiments, the first population of RBCs has a significantly higher minimum elongation index upon deoxygenation than the second population of RBCs. In certain embodiments, the first population of RBCs has a significantly higher velocity upon deoxygenation than the second population of RBCs. In certain embodiments, the first population of RBCs has higher HbF levels than the second population of RBCs.

[0036] Provided herein in certain embodiments are methods of alleviating one or more symptoms of sickle cell disease in a subject in need thereof comprising delivering a first RNP complex including a first gRNA comprising a first targeting domain and a Cpf1 RNA-guided nuclease or a modified Cpf1 RNA-guided nuclease to a first population of unmodified cells comprising a plurality of unmodified CD34+ or hematopoietic stem cells to generate a first population of modified cells comprising a plurality of modified CD34+ or hematopoietic stem cells comprising one or more indels in an HBG gene promoter, and then administering the resultant first population of modified cells to the subject to alleviate one or more symptoms of sickle cell disease. In certain embodiments, 60% or more, 65% or more, 70% or more, 75% or more, 80% or more, 85% or more, 90% or more, or 95% or more of the resultant indels in the resultant plurality of modified CD34+ or hematopoietic stem cells as a whole are deletions of at least 4 base pairs. In certain embodiments, the methods further comprise detecting a population of modified erythroid progeny cells comprising a plurality of modified erythroid progeny cells cultured from the first population of modified cells at about 1 week, 2 weeks, 3 weeks, 4 weeks, 5 weeks, 6 weeks, 7 weeks, 8 weeks, 10 weeks, 12 weeks. 16 weeks, 20 weeks, 1 month, 2 months, 3 months, 4 months, 5 months, 6 months, 8 months, 12 months, 1 year, 2 years, 3 years, 4 years, 5 years, or more than 5 years after administration. In certain embodiments, the cultured cells may include bone marrow (BM)-engrafted CD34+ hematopoietic stem cells or blood cells derived therefrom, e.g., myeloid progenitor or differentiated myeloid cells, e.g., erythrocytes, mast cells, myoblasts; or lymphoid progenitors or differentiated lymphoid cells, e.g., T- or B-lymphocytes or NK cells. In certain embodiments, the method results in long-term engraftment of a plurality of HSC clones in bone marrow, e.g., at least 1 week, 2 weeks, 3 weeks, 4 weeks, 5 weeks, 6 weeks, 7 weeks, 8 weeks, 10 weeks, 12 weeks. 16 weeks, 20 weeks, 1 month, 2 months, 3 months, 4 months, 5 months, 6 months, 8 months, 12 months, 1 year, 2 years, 3 years, 4 years, 5 years, or more than 5 years after administration. In certain embodiments the method results in long-term expression of at least 50%, at least 60%, at least 70%, at least 80%, at least 90%, at least 95%, or at least 99% of total hemoglobin as compared to a healthy subject. In certain embodiments, the method results in a reconstitution of all hematopoietic cell lineages, e.g., without any differentiation bias, e.g., without an erythroid lineage differentiation bias.

[0037] Provided herein in certain embodiments is a population of cells comprising a plurality of red blood cells (RBCs) cultured from a plurality of modified CD34+ cells from a subject having sickle cell disease, each modified cell comprising an indel in an HBG gene promoter. In certain embodiments, the plurality of modified cells as a whole includes the 108 deletions present in all 14 samples in Table 25. In certain embodiments, the population of cells is generated by delivering an RNP complex including a gRNA comprising a first targeting domain and a Cpf1 RNA-guided nuclease or a modified Cpf1 RNA-guided nuclease to a plurality of unmodified CD34+ cells from a subject having sickle cell disease to generate the indels; and culturing the RBCs from the plurality of modified CD34+ cells.

[0038] Provided herein in certain embodiments is a population of cells comprising a plurality of red blood cells (RBCs) cultured from a plurality of modified CD34+ cells from a subject having sickle cell disease, each modified cell comprising an indel in an HBG gene promoter. In certain embodiments, 60% or more, 65% or more, 70% or more, 75% or more, 80% or more, 85% or more, 90% or more, or 95% or more of the indels in the HBG gene promoter are deletions of at least 4 base pairs. In certain embodiments, the population of cells is generated by delivering an RNP complex including a gRNA comprising a first targeting domain and a Cpf1 RNA-guided nuclease or a modified Cpf1 RNA-guided nuclease to a plurality of unmodified CD34+ cells from a subject having sickle cell disease to generate the indels; and culturing the RBCs from the plurality of modified CD34+ cells.

[0039] In certain embodiments of the population of cells comprising a plurality of RBCs provided herein, the plurality of RBCs sickle at a significantly lower oxygen tension, e.g., as measured by relative oxygen pressure, than a population of RBCs cultured from unmodified CD34+ cells, of the subject having sickle cell disease, have a significantly higher minimum elongation index upon deoxygenation than a population of RBCs cultured from unmodified CD34+ cells of the subject having sickle cell disease, and/or have a significantly higher velocity upon deoxygenation than a population of RBCs cultured from unmodified CD34+ cells of the subject having sickle cell disease.

[0040] Provided herein are genome editing systems, ribonucleoprotein (RNP) complexes, guide RNAs, Cpf1 proteins, including modified Cpf1 proteins (Cpf1 variants), and CRISPR-mediated methods for altering the promoter region of one or more γ-globin genes (e.g., HBG1, HBG2, or HBG1 and HBG2) and increasing expression of fetal hemoglobin (HbF). In certain embodiments, an RNP complex may include a guide RNA (gRNA) complexed to a wild-type Cpf1 or modified Cpf1 RNA-guided nuclease (modified Cpf1 protein). In certain embodiments, a gRNA may comprise a sequence set forth in Table 6, Table 12, or Table 13. In certain embodiments, a gRNA may comprise a gRNA targeting domain. In certain embodiments, a gRNA targeting domain may comprise a sequence selected from the group consisting of SEQ ID NOs:1002, 1254, 1258, 1260, 1262, and 1264. In certain embodiments, a gRNA may comprise a gRNA sequence set forth in Table 13. In certain embodiments, a gRNA may comprise a sequence selected from the group consisting of SEQ ID NOs:1022, 1023, 1041-1105. In certain embodiments, the RNP complex may comprise an RNP complex set forth in Table 15. For example, an RNP complex may include a gRNA comprising the sequence set forth in SEQ ID NO: 1051 and a modified Cpf1 protein encoded by the sequence set forth in SEQ ID NO:1097 (RNP32, Table 15).

[0041] The inventors have discovered herein that delivery of an RNP complex including a gRNA complexed to a modified Cpf1 protein may result in increased editing of a target nucleic acid. In certain embodiments, the modified Cpf1 protein may contain one or more modifications. In certain embodiments, the one or more modifications may include, without limitation, one or more mutations in a wild-type Cpf1 amino acid sequence, one or more mutations in a wild-type Cpf1 nucleic acid sequence, one or more nuclear localization signals (NLS), one or more purification tags (e.g., His tag), or a combination thereof. In certain embodiments, a modified Cpf1 may be encoded by a sequence set forth in SEQ ID NOs:1000, 1001, 1008-1018, 1032, 1035-39, 1094-1097, 1107-09 (Cpf1 polypeptide sequences) or SEQ ID NOs:1019-1021, 1110-17 (Cpf1 polynucleotide sequences). In certain embodiments, the gRNA may be a modified or unmodified gRNA. In certain embodiments, the gRNA may comprise a sequence set forth in Table 6, Table 12, or Table 13. In certain embodiments, the RNP complex may comprise an RNP complex set forth in Table 15. For example, the RNP complex may include a gRNA comprising the sequence set forth in SEQ ID NO:1051 and a modified Cpf1 protein encoded by the sequence set forth in SEQ ID NO: 1097 (RNP32, Table 15). In certain embodiments, an RNP complex comprising a modified Cpf1 protein may increase editing of a target nucleic acid. In certain embodiments, an RNP complex comprising a modified Cpf1 protein may increase editing resulting in an increase of productive indels. In various embodiments, an increase in editing of the target nucleic acid may be assessed by any means known to skilled artisans, such as, but not limited to, PCR amplification of the target nucleic acid and subsequent sequencing analysis (e.g., Sanger sequencing, next generation sequencing).

[0042] The inventors have also discovered herein that delivery of an RNP complex including a modified gRNA complexed to an unmodified or modified Cpf1 protein may result in increased editing of a target nucleic acid. In certain embodiments, the modified gRNA may comprise one or more modifications including a phosphorothioate linkage modification, a phosphorodithioate (PS2) linkage modification, a 2′-O-methyl modification, one or more or a stretch of deoxyribonucleic acid (DNA) bases (also referred to herein as a “DNA extension”), one or more or a stretch of ribonucleic acid (RNA) bases (also referred to herein as a “RNA extension”), or combinations thereof. In certain embodiments, the DNA extension may comprise a sequence set forth in Table 18. For example, in certain embodiments, the DNA extension may comprise a sequence set forth in SEQ ID NOs:1235-1250. In certain embodiments, the RNA extension may comprise a sequence set forth in Table 18. For example, in certain embodiments, the RNA extension may comprise a sequence set forth in SEQ ID NOs:1231-1234, 1251-1253. In certain embodiments, the gRNA may comprise a sequence set forth in Table 6, Table 12, or Table 13. In certain embodiments, the RNP complex may comprise an RNP complex set forth in Table 15. For example, the RNP complex may include a gRNA comprising the sequence set forth in SEQ ID NO: 1051 and a modified Cpf1 protein encoded by the sequence set forth in SEQ ID NO:1097 (RNP32, Table 15). In certain embodiments, an RNP complex comprising a modified gRNA may increase editing of a target nucleic acid. In certain embodiments, an RNP complex comprising a modified gRNA may increase editing resulting in an increase of productive indels.

[0043] In certain embodiments, an RNP complex comprising a modified gRNA and a modified Cpf1 protein may increase editing of a target nucleic acid. In certain embodiments, an RNP complex comprising a modified gRNA and a modified Cpf1 protein may increase editing resulting in an increase of productive indels.

[0044] The inventors have also discovered that codelivery of an RNP complex comprising a gRNA complexed to a Cpf1 molecule (e.g., “gRNA-Cpf1-RNP”) with a “booster element” may result in increased editing of a target nucleic acid. In certain embodiments, the RNP complex may comprise an RNP complex set forth in Table 15. For example, the RNP complex may include a gRNA comprising the sequence set forth in SEQ ID NO:1051 and a modified Cpf1 protein encoded by the sequence set forth in SEQ ID NO: 1097 (RNP32, Table 15). As used herein, the term “booster element” refers to an element which, when co-delivered with a RNP complex comprising a gRNA complexed to an RNA-guided nuclease (“gRNA-nuclease-RNP”), increases editing of a target nucleic acid compared with editing of the target nucleic acid without the booster element. In certain embodiments, one or more booster elements may be codelivered with a gRNA-nuclease-RNP complex to increase editing of a target nucleic acid. In certain embodiments, codelivery of a booster element may increase editing resulting in an increase of productive indels. In various embodiments, an increase in editing of the target nucleic acid may be assessed by any means known to skilled artisans, such as, but not limited to, PCR amplification of the target nucleic acid and subsequent sequencing analysis (e.g., Sanger sequencing, next generation sequencing).

[0045] In certain embodiments, a gRNA-nuclease-RNP may comprise a gRNA-Cpf1-RNP. In certain embodiments, a Cpf1 molecule of the gRNA-Cpf1-RNP complex may be a wild-type Cpf1 or modified Cpf1. In certain embodiments, the Cpf1 molecule of the gRNA-Cpf1-RNP may be encoded by a sequence set forth in SEQ ID NOs:1000, 1001, 1008-1018, 1032, 1035-39, 1094-1097, 1107-09 (Cpf1 polypeptide sequences) or SEQ ID NOs:1019-1021, 1110-17 (Cpf1 polynucleotide sequences). In certain embodiments, the gRNA-Cpf1-RNP complex may comprise a gRNA comprising a targeting domain set forth in Table 6 or Table 12. In certain embodiments, the gRNA-Cpf1-RNP complex may comprise a gRNA comprising a sequence set forth in Table 13. In certain embodiments, the gRNA may be a modified or unmodified gRNA.

[0046] In certain embodiments, a booster element may comprise a dead RNP comprising a dead gRNA molecule complexed with an RNA-guided nuclease molecule (“dead gRNA-nuclease-RNP”). In certain embodiments, the dead gRNA-nuclease-RNP may comprise a dead gRNA complexed with a wild-type (WT) Cas9 molecule (“dead gRNA-Cas9-RNP”), a dead gRNA complexed with a Cas9 nickase molecule (“dead gRNA-nickase-RNP”) or a dead gRNA complexed with an enzymatically inactive (ei) Cas9 molecule (“dead gRNA-eiCas9-RNP”). In certain embodiments, the dead gRNA-nuclease-RNP complex may have decreased activity or lack nuclease activity. In certain embodiments, the dead gRNA of the dead gRNA-nuclease-RNP complex may comprise any of the dead gRNAs set forth herein. For example, the dead gRNA may comprise a targeting domain may be the same as or may differ by no more than 3 nucleotides from a dead gRNA targeting domain set forth in Table 8 or Table 9. In certain embodiments, the dead gRNA may include a targeting domain comprising a truncation of a gRNA targeting domain. In certain embodiments, the gRNA targeting domain to be truncated may be a gRNA targeting domain set forth in Table 8 or Table 9. In certain embodiments, the dead gRNA may be a modified or unmodified dead gRNA. As shown herein, codelivery of a gRNA-Cpf1-RNP with a dead gRNA-Cas9-RNP (i.e., an RNP comprising a dead gRNA complexed to a WT Cas9) or codelivery of a gRNA-Cpf1-RNP with a dead gRNA-nickase-RNP (i.e., an RNP comprising a dead gRNA complexed to a Cas9 nickase (i.e., the Cas9 D10A nickase)) resulted in an increase in total editing above levels observed following delivery of gRNA-Cpf1-RNP alone (see, e.g., Examples 5, 7, 8). Dead gRNA molecules may comprise targeting domains complementary to regions proximal to or within a target region (e.g., the CCAAT box target region, 13 nt target region, proximal HBG1/2 promoter target sequence, and/or the GATA1 binding motif in BCL11 Ae) in a target nucleic acid. In certain embodiments, “proximal to” may denote the region within 10, 25, 50, 100, or 200 nucleotides of a target region (e.g., the CCAAT box target region, 13 nt target region, proximal HBG1/2 promoter target sequence, and/or the GATA1 binding motif in BCL11Ae). In certain embodiments, one or more booster elements may be comprised of one or more dead gRNA-nuclease-RNPs, e.g., dead gRNA-Cas9-RNP, dead gRNA-nickase-RNP, dead gRNA-eiCas9-RNP, to be codelivered with a gRNA-Cpf1-RNP. In certain embodiments, codelivery of a dead gRNA-nuclease-RNP does not alter the indel profile of a gRNA-Cpf1-RNP.

[0047] In certain embodiments, a booster element may comprise an RNP complex comprising a gRNA molecule complexed with an RNA-guided nuclease nickase molecule (“gRNA-nickase-RNP”). In certain embodiments, the RNA-guided nuclease nickase molecule may be a Cas9 nickase molecule, e.g., Cas9 D10A nickase. In certain embodiments, the gRNA of the gRNA-nickase-RNP may comprise any of the gRNAs set forth herein. For example, the gRNA may comprise a gRNA targeting domain set forth in Table 8 or Table 9. In certain embodiments, the gRNA may be a modified or unmodified gRNA. As shown herein, codelivery of gRNA-Cpf1-RNP with a gRNA-nickase-RNP complex (RNP comprising a guide RNA complexed to a Cas9D10A nickase molecule) resulted in an increase in total editing above levels observed following delivery of gRNA-Cpf1-RNP alone (see, e.g., Examples 4, 5). Additionally, codelivery of a gRNA-nickase-RNP complex with a gRNA-Cpf1-RNP complex altered the directionality, length, and/or position of the indel profile of gRNA-Cpf1-RNP. In certain embodiments, a booster enhancer may be used to provide a desired editing outcome, for example, to increase the rate of productive indels. In certain embodiments, codelivery of a gRNA-nickase-RNP complex with a gRNA-Cpf1-RNP complex may alter the indel profile of the gRNA-Cpf1-RNP.

[0048] In certain embodiments, a booster element may comprise a single stranded oligodeoxynucleotide (ssODN) or a double stranded oligodeoxynucleotide (dsODN). In certain embodiments, the ssODN may be any ssODN disclosed herein. In certain embodiments, an ssODN may comprise a sequence set forth in Table 7. For example, in certain embodiments, an ssODN may comprise the sequence set forth in SEQ ID NO:1040.

[0049] In one aspect, the disclosure relates to an RNP complex comprising a CRISPR from Prevotella and Franciscella 1 (Cpf1) RNA-guided nuclease or a variant thereof and a gRNA, wherein the gRNA is capable of binding to a target site in a promoter of an HBG gene in a cell. In certain embodiments, the gRNA may be modified or unmodified. In certain embodiments, the gRNA may comprise one or more modifications including a phosphorothioate linkage modification, a phosphorodithioate (PS2) linkage modification, a 2′-O-methyl modification, a DNA extension, an RNA extension, or combinations thereof. In certain embodiments, the DNA extension may comprise a sequence set forth in Table 18. In certain embodiments, the RNA extension may comprise a sequence set forth in Table 18. In certain embodiments, the gRNA may comprise a sequence set forth in Table 6, Table 12, or Table 13. In certain embodiments, the RNP complex may comprise an RNP complex set forth in Table 15. For example, the RNP complex may include a gRNA comprising the sequence set forth in SEQ ID NO: 1051 and a Cpf1 variant protein encoded by the sequence set forth in SEQ ID NO:1097 (RNP32, Table 15). In certain embodiments, the Cpf1 variant protein may contain one or more modifications. In certain embodiments, the one or more modifications may include, without limitation, one or more mutations in a wild-type Cpf1 amino acid sequence, one or more mutations in a wild-type Cpf1 nucleic acid sequence, one or more nuclear localization signals (NLS), one or more purification tags (e.g., His tag), or a combination thereof. In certain embodiments, a Cpf1 variant protein may be encoded by a sequence set forth in SEQ ID NOs:1000, 1001, 1008-1018, 1032, 1035-39, 1094-1097, 1107-09 (Cpf1 polypeptide sequences) or SEQ ID NOs:1019-1021, 1110-17 (Cpf1 polynucleotide sequences).

[0050] In one aspect, the disclosure relates to a method of altering a promoter of an HBG gene in a cell comprising contacting the cell with an RNP complex disclosed herein. In certain embodiments, the alteration may comprise an indel within one or more regions set forth in Table 11. In certain embodiments, the alteration may comprise an indel within a CCAAT box target region of the promoter of an HBG gene. For example, in certain embodiments, the alteration may comprise an indel within Chr 11 (NC_000011.10): 5,249,955-5,249,987 (Table 11, Region 6), Chr 11 (NC_000011.10): 5,254,879-5,254,909 (Table 11, Region 16), or a combination thereof. In certain embodiments, the RNP complex may comprise a gRNA and a Cpf1 protein. In certain embodiments, the gRNA may comprise an RNA targeting domain set forth in Table 13. In certain embodiments, the gRNA targeting domain may comprise a sequence selected from the group consisting of SEQ ID NOs:1002, 1254, 1258, 1260, 1262, and 1264. In certain embodiments, the gRNA may comprise a gRNA sequence set forth in Table 13. In certain embodiments, the gRNA may comprise a sequence selected from the group consisting of SEQ ID NOs:1022, 1023, 1041-1105. In certain embodiments, a gRNA may be configured to provide an editing event at Chr11:5249973, Chr11:5249977 (HBG1); Chr11:5250042, Chr11:5250046 (HBG1); Chr11:5250055, Chr11:5250059 (HBG1); Chr11:5250179, Chr11:5250183 (HBG1); Chr11:5254897, Chr11:5254901 (HBG2); Chr11:5254897, Chr11:5254901 (HBG2); Chr11:5254966, 5254970 (HBG2); Chr11:5254979, 5254983 (HBG2) (Table 16, Table 17). In certain embodiments, the cell may be further contacted with a booster element. In certain embodiment, a booster element may comprise a single stranded oligodeoxynucleotide (ssODN) or a double stranded oligodeoxynucleotide (dsODN). In certain embodiments, the ssODN may be any ssODN disclosed herein. In certain embodiments, an ssODN may comprise a sequence set forth in Table 7. For example, in certain embodiments, an ssODN may comprise the sequence set forth in SEQ ID NO:1040.

[0051] In one aspect, the disclosure relates to an isolated cell comprising an alteration in a promoter of HBG gene generated by the delivery of an RNP complex to the cell. In certain embodiments, the RNP complex may comprise a gRNA and a Cpf1 protein. In certain embodiments, the gRNA may be modified or unmodified. In certain embodiments, the gRNA may comprise one or more modifications including a phosphorothioate linkage modification, a phosphorodithioate (PS2) linkage modification, a 2′-O-methyl modification, a DNA extension, an RNA extension, or combinations thereof. In certain embodiments, the DNA extension may comprise a sequence set forth in Table 18. In certain embodiments, the RNA extension may comprise a sequence set forth in Table 18. In certain embodiments, the gRNA may comprise a sequence set forth in Table 6, Table 12, or Table 13. In certain embodiments, the RNP complex may comprise an RNP complex set forth in Table 15. For example, the RNP complex may include a gRNA comprising the sequence set forth in SEQ ID NO:1051 and a Cpf1 variant protein encoded by the sequence set forth in SEQ ID NO:1097 (RNP32, Table 15). In certain embodiments, the Cpf1 variant protein may contain one or more modifications. In certain embodiments, the one or more modifications may include, without limitation, one or more mutations in a wild-type Cpf1 amino acid sequence, one or more mutations in a wild-type Cpf1 nucleic acid sequence, one or more nuclear localization signals (NLS), one or more purification tags (e.g., His tag), or a combination thereof. In certain embodiments, a Cpf1 variant protein may be encoded by a sequence set forth in SEQ ID NOs:1000, 1001, 1008-1018, 1032, 1035-39, 1094-1097, 1107-09 (Cpf1 polypeptide sequences) or SEQ ID NOs:1019-1021, 1110-17 (Cpf1 polynucleotide sequences). In certain embodiments, a booster element may be co-delivered with the RNP complex. In certain embodiment, a booster element may comprise a single stranded oligodeoxynucleotide (ssODN) or a double stranded oligodeoxynucleotide (dsODN). In certain embodiments, the ssODN may be any ssODN disclosed herein. In certain embodiments, an ssODN may comprise a sequence set forth in Table 7. For example, in certain embodiments, an ssODN may comprise the sequence set forth in SEQ ID NO:1040.

[0052] In one aspect, the disclosure relates to an ex vivo method of increasing the level of fetal hemoglobin (HbF) in a human cell by genome editing using an RNP complex comprising a gRNA and a Cpf1 RNA-guided nuclease or a variant thereof to affect an alteration in a promoter of an HBG gene, thereby to increase expression of HbF. In certain embodiments, the gRNA may be modified or unmodified. In certain embodiments, the gRNA may comprise one or more modifications including a phosphorothioate linkage modification, a phosphorodithioate (PS2) linkage modification, a 2′-O-methyl modification, a DNA extension, an RNA extension, or combinations thereof. In certain embodiments, the DNA extension may comprise a sequence set forth in Table 18. In certain embodiments, the RNA extension may comprise a sequence set forth in Table 18. In certain embodiments, the gRNA may comprise a sequence set forth in Table 6, Table 12, or Table 13. In certain embodiments, the RNP complex may comprise an RNP complex set forth in Table 15. For example, the RNP complex may include a gRNA comprising the sequence set forth in SEQ ID NO:1051 and a Cpf1 variant protein encoded by the sequence set forth in SEQ ID NO:1097 (RNP32, Table 15). In certain embodiments, the Cpf1 variant protein may contain one or more modifications. In certain embodiments, the one or more modifications may include, without limitation, one or more mutations in a wild-type Cpf1 amino acid sequence, one or more mutations in a wild-type Cpf1 nucleic acid sequence, one or more nuclear localization signals (NLS), one or more purification tags (e.g., His tag), or a combination thereof. In certain embodiments, a Cpf1 variant protein may be encoded by a sequence set forth in SEQ ID NOs:1000, 1001, 1008-1018, 1032, 1035-39, 1094-1097, 1107-09 (Cpf1 polypeptide sequences) or SEQ ID NOs:1019-1021, 1110-17 (Cpf1 polynucleotide sequences). In certain embodiments, a booster element may be co-delivered with the RNP complex. In certain embodiment, a booster element may comprise a single stranded oligodeoxynucleotide (ssODN) or a double stranded oligodeoxynucleotide (dsODN). In certain embodiments, the ssODN may be any ssODN disclosed herein. In certain embodiments, an ssODN may comprise a sequence set forth in Table 7. For example, in certain embodiments, an ssODN may comprise the sequence set forth in SEQ ID NO:1040.

[0053] In one aspect, the disclosure relates to a population of CD34+ or hematopoietic stem cells, wherein one or more cells in the population comprises an alteration in a promoter of an HBG gene, which alteration is generated by delivering an RNP complex comprising a gRNA and a Cpf1 RNA-guided nuclease or a variant thereof to the population of CD34+ or hematopoietic stem cells. In certain embodiments, the gRNA may be modified or unmodified. In certain embodiments, the gRNA may comprise one or more modifications including a phosphorothioate linkage modification, a phosphorodithioate (PS2) linkage modification, a 2′-O-methyl modification, a DNA extension, an RNA extension, or combinations thereof. In certain embodiments, the DNA extension may comprise a sequence set forth in Table 18. In certain embodiments, the RNA extension may comprise a sequence set forth in Table 18. In certain embodiments, the gRNA may comprise a sequence set forth in Table 6, Table 12, or Table 13. In certain embodiments, the RNP complex may comprise an RNP complex set forth in Table 15. For example, the RNP complex may include a gRNA comprising the sequence set forth in SEQ ID NO: 1051 and a Cpf1 variant protein encoded by the sequence set forth in SEQ ID NO:1097 (RNP32, Table 15). In certain embodiments, the Cpf1 variant protein may contain one or more modifications. In certain embodiments, the one or more modifications may include, without limitation, one or more mutations in a wild-type Cpf1 amino acid sequence, one or more mutations in a wild-type Cpf1 nucleic acid sequence, one or more nuclear localization signals (NLS), one or more purification tags (e.g., His tag), or a combination thereof. In certain embodiments, a Cpf1 variant protein may be encoded by a sequence set forth in SEQ ID NOs:1000, 1001, 1008-1018, 1032, 1035-39, 1094-1097, 1107-09 (Cpf1 polypeptide sequences) or SEQ ID NOs:1019-1021, 1110-17 (Cpf1 polynucleotide sequences). In certain embodiments, a booster element may be co-delivered with the RNP complex. In certain embodiment, a booster element may comprise a single stranded oligodeoxynucleotide (ssODN) or a double stranded oligodeoxynucleotide (dsODN). In certain embodiments, the ssODN may be any ssODN disclosed herein. In certain embodiments, an ssODN may comprise a sequence set forth in Table 7. For example, in certain embodiments, an ssODN may comprise the sequence set forth in SEQ ID NO:1040.

[0054] In one aspect, the disclosure relates to a method of alleviating one or more symptoms of sickle cell disease in a subject in need thereof, the method comprising: a) isolating a population of CD34+ or hematopoietic stem cells from the subject; b) modifying the population of isolated cells ex vivo by delivering an RNP complex comprising a gRNA and a Cpf1 RNA-guided nuclease or a variant thereof to the population of isolated cells, thereby to affect an alteration in a promoter of an HBG gene in one or more cells in the population; and c) administering the modified population of cells to the subject, thereby to alleviate one or more symptoms of sickle cell disease in the subject. In certain embodiments, the method may further comprise detecting progeny/daughter cells of the administered modified cells in the subject, e.g., in the form of BM-engrafted CD34+ hematopoietic stem cells or blood cells derived from those (e.g., myeloid progenitor or differentiated myeloid cells (e.g., erythrocyte, mast cells, myoblast); or lymphoid progenitors or differentiated lymphoid cells (e.g., T- or B-lymphocyte, or NK cell), e.g., at least [1, 2, 3, 4, 5, 6, 7, 8, 12, 16, or 20] weeks, or at least [1, 2, 3, 4, 5, or 6] months, or at least [1, 2, 3, 4, or 5] years after administration. In certain embodiments, the method may result in a reconstitution of all hematopoietic cell lineages, e.g., without any differentiation bias, e.g., without an erythroid lineage differentiation bias. In certain embodiments, the method may comprise administering a plurality of edited cells, and the method may result in long-term engraftment [e.g., at least [1, 2, 3, 4, 5, 6, 7, 8, 12, 16, or 20] weeks, or at least [1, 2, 3, 4, 5, or 6] months, or at least [1, 2, 3, 4, or 5] years after administration] of a plurality of [at least 5, 10, 15, 20, 25, . . . 100] different HSC clones in the BM. In certain embodiments, the method may further comprise detecting the level of total hemoglobin expression in the subject, at least [1, 2, 3, 4, 5, 6, 7, 8, 12, 16, or 20] weeks, or at least [1, 2, 3, 4, 5, or 6] months, or at least [1, 2, 3, 4, or 5] years after administration. In certain embodiments, the method may result in long-term expression [e.g., at least [1, 2, 3, 4, 5, 6, 7, 8, 12, 16, or 20] weeks, or at least [1, 2, 3, 4, 5, or 6] months, or at least [1, 2, 3, 4, or 5] years after administration] of [at least 50%, at least 60%, at least 99%] of total hemoglobin as compared to a healthy subject (e.g., as total Hb (e.g., HbA and HbF (if any) combined)). In certain embodiments, the alteration may comprise an indel within a CCAAT box target region of the promoter of the HBG gene. In certain embodiments, the RNP complex may be delivered using electroporation. In certain embodiments, at least about 5%, at least about 10%, at least about 20%, at least about 30%, at least about 40%, at least about 50%, at least about 60%, at least about 70%, at least about 80% or at least about 90% of the cells in the population of cells comprise a productive indel.

[0055] In one aspect, the disclosure relates to a gRNA comprising a 5′ end and a 3′ end, and comprising a DNA extension at the 5′ end and a 2′-O-methyl-3′-phosphorothioate modification at the 3′ end, wherein the gRNA includes an RNA segment capable of hybridizing to a target site and an RNA segment capable of associating with a Cpf1 RNA-guided nuclease. In certain embodiments, the DNA extension may comprise a sequence set forth in SEQ ID NOs:1235-1250. In certain embodiments, the gRNA may be modified or unmodified. In certain embodiments, the gRNA may comprise one or more modifications including a phosphorothioate linkage modification, a phosphorodithioate (PS2) linkage modification, a 2′-O-methyl modification, a DNA extension, an RNA extension, or combinations thereof. In certain embodiments, the DNA extension may comprise a sequence set forth in Table 18. In certain embodiments, the RNA extension may comprise a sequence set forth in Table 18. In certain embodiments, the gRNA may comprise a sequence set forth in Table 6, Table 12, or Table 13.

[0056] In one aspect, the disclosure relates to an RNP complex comprising a Cpf1 RNA-guided nuclease as disclosed herein and a gRNA as disclosed herein.

[0057] Also provided herein are genome editing systems, guide RNAs, and CRISPR-mediated methods for altering one or more γ-globin genes (e.g., HBG1, HBG2, or HBG1 and HBG2) and increasing expression of fetal hemoglobin (HbF). In certain embodiments, one or more gRNAs comprising a sequence set forth in Table 12 or Table 13 may be used to introduce alterations in the promoter region of the HBG gene. In certain embodiments, genome editing systems, guide RNAs, and CRISPR-mediated methods may alter a 13 nucleotide (nt) target region that is 5′ of the transcription site of the HBG1, HBG2, or HBG1 and HBG2 gene (“13 nt target region”). In certain embodiments, genome editing systems, guide RNAs, and CRISPR-mediated methods may alter a CCAAT box target region that is 5′ of the transcription site of the HBG1, HBG2, or HBG1 and HBG2 gene (“CCAAT box target region”). In certain embodiments, the CCAAT box target region may be the region that is at or near the distal CCAAT box and includes the nucleotides of the distal CCAAT box and 25 nucleotides upstream (5′) and 25 nucleotides downstream (3′) of the distal CCAAT box (i.e., HBG1/2 c.−86 to −140). In certain embodiments, the CCAAT box target region may be the region that is at or near the distal CCAAT box and includes the nucleotides of the distal CCAAT box and 5 nucleotides upstream (5′) and 5 nucleotides downstream (3′) of the distal CCAAT box (i.e., HBG1/2 c.−106 to −120). In certain embodiments, the CCAAT box target region may comprise a 18 nt target region, a 13 nt target region, a 11 nt target region, a 4 nt target region, a 1 nt target region, a −117G>A target region, or a combination thereof as disclosed herein. In certain embodiments, the alteration may be a 18 nt deletion, 13 nt deletion, 11 nt deletion, 4 nt deletion, 1 nt deletion, a substitution from G to A at c.−117 of the HBG1, HBG2, or HBG1 and HBG2 gene, or a combination thereof. In certain embodiments, the alteration may be a non-naturally occurring alteration or a naturally occurring alteration.

[0058] Also provided herein in certain embodiments are the use of optional genome editing system components such as template nucleic acids (oligonucleotide donor templates). In certain embodiments, template nucleic acids for use in targeting the CCAAT target region may include, without limitation, template nucleic acids encoding alterations of the CCAAT box target region. In certain embodiments, the CCAAT box target region may comprise a 18 nt target region, a 11 nt target region, a 4 nt target region, a 1 nt target region, or a combination thereof. In certain embodiments, the template nucleic acid may be a single stranded oligodeoxynucleotide (ssODN) or a double stranded oligodeoxynucleotide (dsODN). In certain embodiments, 5′ and 3′ homology arms, and exemplary full-length donor templates encoding alterations at the CCAAT box target region are also presented below (e.g., SEQ ID NOS: 974-995, 1040). In certain embodiments, the template nucleic acid may be a positive strand or a negative strand. In certain embodiments, the ssODN may comprise a 5′ homology arm, a replacement sequence, and a 3′ homology arm. In certain embodiments, the 5′ homology arm may be about 25 to about 200 nucleotides or more in length, e.g., at least about 25, 50, 75, 100, 125, 150, 175, or 200 nucleotides in length; the replacement sequence may comprise 0 nucleotides in length; and the 3′ homology arm may be about 25 to about 200 nucleotides or more in length, e.g., at least about 25, 50, 75, 100, 125, 150, 175, or 200 nucleotides in length. In certain embodiments, the ssODN may comprise one or more phosphorothioates.

[0059] In certain embodiments, the genome editing systems, guide RNAs, and CRISPR-mediated methods for altering one or more γ-globin genes (e.g., HBG1, HBG2, or HBG1 and HBG2), may include an RNA-guided nuclease. In certain embodiments, the RNA-guided nuclease may a Cpf1 or modified Cpf1 as disclosed herein.

[0060] In one aspect, the disclosure relates to compositions including a plurality of cells generated by the methods disclosed above, in which at least 20%, 30%, 40%, 50%, 60%, 70%, 80% or 90% of the cells include an alteration of a sequence of a 13 nt target region of the human HBG1 or HBG2 gene or a plurality of cells generated by the methods disclosed above, wherein at least 20%, 30%, 40%, 50%, 60%, 70%, 80% or 90% of the cells include an alteration of a sequence of a 13 nt target region of the human HBG1 or HBG2 gene. In certain embodiments, at least a portion of the plurality of cells may be within an erythroid lineage. In certain embodiments, the plurality of cells may be characterized by an increased level of fetal hemoglobin expression relative to an unmodified plurality of cells. In certain embodiments, the level of fetal hemoglobin may be increased by at least 20%, 30%, 40%, 50%, 60%, 70%, 80% or 90%. In certain embodiments, the compositions may further include a pharmaceutically acceptable carrier.

[0061] The disclosure herein also relates to methods of altering a cells, including contacting a cell with any of the genome editing systems disclosed herein. In certain embodiments, the step of contacting the cell may comprise contacting the cell with a solution comprising first and second ribonucleoprotein complexes. In certain embodiments, the step of contacting the cell with the solution further comprises electroporating the cells, thereby introducing the first and second ribonucleoprotein complexes into the cell.

[0062] A genome editing system or method including any of all of the features described above may include a target nucleic acid comprising a human HBG1, HBG2 gene, or a combination thereof. In certain embodiments, the target region may be a CCAAT box target region of the human HBG1, HBG2 gene, or a combination thereof. In certain embodiments, the first targeting domain sequence may be complementary to a first sequence on a side of a CCAAT box target region of the human HBG1, HBG2 gene, or a combination thereof, in which the first sequence optionally overlaps the CCAAT box target region of the human HBG1, HBG2 gene, or a combination thereof. In certain embodiments, the second targeting domain sequence may be complementary to a second sequence on a side of a CCAAT box target region of the human HBG1, HBG2 gene, or a combination thereof, in which the second sequence optionally overlaps the CCAAT box target region of the human HBG1, HBG2 gene, or a combination thereof. In certain embodiments, the first targeting domain may comprise a truncation of a gRNA targeting domain. In certain embodiments, the gRNA targeting domain may include the gRNAs set forth in Table 8 or Table 9, and the gRNA targeting domain has been truncated from a 5′ end of the gRNA targeting domain. In certain embodiments, the first targeting domain may be the same as or differs by no more than 3 nucleotides from a dgRNA targeting domain set forth in Table 8 or Table 9. In certain embodiments, the second targeting domain differs by no more than 3 nucleotides from a gRNA targeting domain set forth in Table 8 or Table 9. In certain embodiments, the indel may alter the CCAAT box target region indel. In certain embodiments, the indel may be a productive indel resulting in an increased level of fetal hemoglobin expression. In certain embodiments, the gRNA, dgRNA, or both may be in vitro synthesized or chemically synthesized.

[0063] In certain embodiments, a cell may include at least one modified allele of the HBG locus generated by any of the methods for altering a cell disclosed herein, in which the modified allele of the HBG locus comprises an alteration of the human HBG1 gene, HBG2, gene, or a combination thereof.

[0064] In certain embodiments, an isolated population of cells may be modified by any of the methods for altering a cells disclosed herein, wherein the population of cells may include a distribution of indels that may be different from an isolated population of cells or their progenies of the same cell type that have not been modified by the method.

[0065] In certain embodiments, a plurality of cells may be generated by any of the methods for altering a cells disclosed herein, in which at least 20%, 30%, 40%, 50%, 60%, 70%, 80%, or 90% of the cells may include an alteration of a sequence in the CCAAT box target region of the human HBG1 gene, HBG2 gene or a combination thereof.

[0066] In certain embodiments, the cells disclosed herein may be used for a medicament. In certain embodiments, the cells may be for use in the treatment of β-hemoglobinopathy. In certain embodiments, β-hemoglobinopathy may be selected from the group consisting of sickle cell disease and beta-thalassemia.

[0067] In one aspect, the disclosure relates to compositions including a plurality of cells generated by a method including a dgRNA disclosed above, in which at least 20%, 30%, 40%, 50%, 60%, 70%, 80% or 90% of the cells include an alteration of a sequence of a CCAAT box target region of the human HBG1 or HBG2 gene or a plurality of cells generated by the method disclosed above, wherein at least 20%, 30%, 40%, 50%, 60%, 70%, 80% or 90% of the cells include an alteration of a sequence of a CCAAT box target region of the human HBG1 or HBG2. In certain embodiments, at least a portion of the plurality of cells may be within an erythroid lineage. In certain embodiments, the plurality of cells may be characterized by an increased level of fetal hemoglobin expression relative to an unmodified plurality of cells. In certain embodiments, the level of fetal hemoglobin may be increased by at least 20%, 30%, 40%, 50%, 60%, 70%, 80% or 90%. In certain embodiments, the compositions may further include a pharmaceutically acceptable carrier.

[0068] In one aspect, the disclosure relates to a population of cells modified by a genome editing system including a dgRNA described above, wherein the population of cells comprise a higher percentage of a productive indel relative to a population of cells not modified by the genome editing system. The disclosure also relates to a population of cells modified by the genome editing system including a dgRNA described above, wherein a higher percentage of the population of cells are capable of differentiating into a population of cells of an erythroid lineage that express HbF relative to a population of cells not modified by the genome editing system. In certain embodiments, the higher percentage may be at least about 15%, at least about 20%, at least about 25%, at least about 30%, or at least about 40% higher. In certain embodiments, the cells may be hematopoietic stem cells. In certain embodiments, the cells may be capable of differentiating into an erythroblast, erythrocyte, or a precursor of an erythrocyte or erythroblast. In certain embodiments, the indel may be created by a repair mechanism other than microhomology-mediated end joining (MMEJ) repair.

[0069] The disclosure also relates to the use of any of the cells disclosed herein in the manufacture of a medicament for treating β-hemoglobinopathy in a subject.

[0070] In one aspect, the disclosure relates to a method of treating a β-hemoglobinopathy in a subject in need thereof, comprising administering to the subject the cells disclosed herein. In certain embodiments, a method of treating a β-hemoglobinopathy in a subject in need thereof, may include administering a population of modified hematopoietic cells to the subject, wherein one or more cells have been altered according to the methods of altering a cell disclosed herein. In certain embodiments, the method may further comprise detecting progeny/daughter cells of the administered modified cells in the subject, e.g., in the form of BM-engrafted CD34+ hematopoietic stem cells or blood cells derived from those (e.g., myeloid progenitor or differentiated myeloid cells (e.g., erythrocyte, mast cells, myoblast); or lymphoid progenitors or differentiated lymphoid cells (e.g., T- or B-lymphocyte, or NK cell), e.g., at least [1, 2, 3, 4, 5, 6, 7, 8, 12, 16, or 20] weeks, or at least [1, 2, 3, 4, 5, or 6] months, or at least [1, 2, 3, 4, or 5] years after administration. In certain embodiments, the method may result in a reconstitution of all hematopoietic cell lineages, e.g., without any differentiation bias, e.g., without an erythroid lineage differentiation bias. In certain embodiments, the method may comprise administering a plurality of edited cells, and the method may result in long-term engraftment [e.g., at least [1, 2, 3, 4, 5, 6, 7, 8, 12, 16, or 20] weeks, or at least [1, 2, 3, 4, 5, or 6] months, or at least [1, 2, 3, 4, or 5] years after administration] of a plurality of [at least 5, 10, 15, 20, 25, . . . 100] different HSC clones in the BM. In certain embodiments, the method may further comprise detecting the level of total hemoglobin expression in the subject, at least [1, 2, 3, 4, 5, 6, 7, 8, 12, 16, or 20] weeks, or at least [1, 2, 3, 4, 5, or 6] months, or at least [1, 2, 3, 4, or 5] years after administration. In certain embodiments, the method may result in long-term expression [e.g., at least [1, 2, 3, 4, 5, 6, 7, 8, 12, 16, or 20] weeks, or at least [1, 2, 3, 4, 5, or 6] months, or at least [1, 2, 3, 4, or 5] years after administration] of [at least 50%, at least 60%, at least 99%] of total hemoglobin as compared to a healthy subject (e.g., as total Hb (e.g., HbA and HbF (if any) combined)). In certain embodiments, the alteration may comprise an indel within a CCAAT box target region of the promoter of the HBG gene.

[0071] In one aspect, the disclosure relates to a genome editing system, comprising: an RNA-guided nuclease; and a first guide RNA, in which the first guide RNA may comprise a first targeting domain that is complementary to a first sequence on a side of a CCAAT box target region of a human HBG1, HBG2 gene, or a combination thereof, in which the first sequence optionally overlaps the CCAAT box target region of the human HBG1, HBG2 gene, or a combination thereof. In certain embodiments, the genome editing system may further comprise a template nucleic acid encoding an alteration of the CCAAT box target region of a human HBG1, HBG2 gene, or a combination thereof. In certain embodiments, the template nucleic acid may be a single stranded oligodeoxynucleotide (ssODN) or a double stranded oligodeoxynucleotide (dsODN). In certain embodiments, the ssODN may comprise a 5′ homology arm, a replacement sequence, and a 3′ homology arm. In certain embodiments, the homology arms may be symmetrical in length. In certain embodiments, the homology arms may be asymmetrical in length. In certain embodiments, the ssODN may comprise one or more phosphorothioate modifications. In certain embodiments, the one or more phosphorothioate modifications may be at the 5′ end, the 3′ end or a combination thereof. In certain embodiments, the ssODN may be a positive or negative strand. In certain embodiments, the alteration may be a non-naturally occurring alteration. In certain embodiments, the alteration may comprise a deletion of the CCAAT box target region. In certain embodiments, the deletion may comprise a 18 nt deletion, a 11 nt deletion, a 4 nt deletion, a 1 nt deletion, or a combination thereof. In certain embodiments, the CCAAT box target region may comprise a 18 nt target region, a 11 nt target region, a 4 nt target region, a 1 nt target region, or a combination thereof. In certain embodiments, the 5′ homology arm may be about 25 to about 200 or more nucleotides in length, e.g., at about least 25, 50, 75, 100, 125, 150, 175, or 200 nucleotides in length; the replacement sequence may comprise 0 nucleotides in length; and the 3′ homology arm may be about 25 to about 200 or more nucleotides in length, e.g., at least about 25, 50, 75, 100, 125, 150, 175, or 200 nucleotides in length. In certain embodiments, the 5′ homology arm may comprise about 50 to 100 bp, e.g., 55 to 95, 60 to 90, 70 to 90, or 80 to 90 bp, homology 5′ of the 18 nt target region and the 3′ homology arm may comprise about 50 to 100 bp, e.g., 55 to 95, 60 to 90, 70 to 90, or 80 to 90 bp, homology 3′ of the 18 nt target region. In certain embodiments, the ssODN may comprise, may consist essentially of, or may consist of SEQ ID NO:974 or SEQ ID NO:975. In certain embodiments, the 5′ homology arm may comprise about 50 to 100 bp, e.g., 55 to 95, 60 to 90, 70 to 90, or 80 to 90 bp, homology 5′ of the 11 nt target region and the 3′ homology arm may comprise about 50 to 100 bp, e.g., 55 to 95, 60 to 90, 70 to 90, or 80 to 90 bp, homology 3′ of the 11 nt target region. In certain embodiments, the ssODN may comprise, may consist essentially of, or may consist of SEQ ID NO:976 or SEQ ID NO:978. In certain embodiments, the 5′ homology arm may comprise about 50 to 100 bp, e.g., 55 to 95, 60 to 90, 70 to 90, or 80 to 90 bp, homology 5′ of the 4 nt target region and the 3′ homology arm may comprise about 50 to 100 bp, e.g., 55 to 95, 60 to 90, 70 to 90, or 80 to 90 bp, homology 3′ of the 4 nt target region. In certain embodiments, the ssODN may comprise, may consist essentially of, or may consist of a sequence selected from the group consisting of SEQ ID NO:984, SEQ ID NO:985, SEQ ID NO:986, SEQ ID NO:987, SEQ ID NO:988, SEQ ID NO:989, SEQ ID NO:990, SEQ ID NO:991, SEQ ID NO:992, SEQ ID NO:993, SEQ ID NO:994, and SEQ ID NO:995. In certain embodiments, the 5′ homology arm may comprise about 50 to 100 bp, e.g., 55 to 95, 60 to 90, 70 to 90, or 80 to 90 bp, homology 5′ of the 1 nt target region and the 3′ homology arm may comprise about 50 to 100 bp, e.g., 55 to 95, 60 to 90, 70 to 90, or 80 to 90 bp, homology 3′ of the 1 nt target region. In certain embodiments, the homology arms may be symmetrical in length. In certain embodiments, the ssODN may comprise, may consist essentially of, or may consist of SEQ ID NO:982 or SEQ ID NO:983. In certain embodiments, the alteration may be a naturally occurring alteration. In certain embodiments, the alteration may comprise a deletion or mutation of the CCAAT box target region. In certain embodiments, the CCAAT box target region may comprise a 13 nt target region, −117G>A target region, or a combination thereof. In certain embodiments, the alteration may comprise a 13 nt deletion at the 13 nt target region or a substitution from G to A at the −117G>A target region, or a combination thereof. In certain embodiments, the 5′ homology arm may comprise about 50 to 100 bp, e.g., 55 to 95, 60 to 90, 70 to 90, or 80 to 90 bp, homology 5′ of the 13 nt target region and the 3′ homology arm may comprise about 50 to 100 bp, e.g., 55 to 95, 60 to 90, 70 to 90, or 80 to 90 bp, homology 3′ of the 13 nt target region. In certain embodiments, the ssODN may comprise, may consist essentially of, or may consist of SEQ ID NO:977 or SEQ ID NO:979. In certain embodiments, the 5′ homology arm may comprise about 50 to 100 bp, e.g., 55 to 95, 60 to 90, 70 to 90, or 80 to 90 bp, homology 5′ of the 13 nt target region and the 3′ homology arm may comprise about 50 to 100 bp, e.g., 55 to 95, 60 to 90, 70 to 90, or 80 to 90 bp, homology 3′ of the 13 nt target region. In certain embodiments, the ssODN may comprise, may consist essentially of, or may consist of SEQ ID NO:980 or SEQ ID NO:981. In certain embodiments, the RNA-guided nuclease may be an S. pyogenes Cas9. In certain embodiments, the RNA-guided nuclease may be a Cpf1 variant as disclosed herein. In certain embodiments, the first targeting domain may differ by no more than 3 nucleotides from a targeting domain listed in Table 12, Table 13 or a gRNA in Table 13. In certain embodiments, the genome editing system may further comprise a second guide RNA, wherein the second guide RNA may comprise a second targeting domain that may be complementary to a second sequence on a side of a CCAAT box target region of a human HBG1, HBG2 gene, or a combination thereof, wherein the second sequence optionally overlaps the CCAAT box target region of the human HBG1, HBG2 gene, or a combination thereof. In certain embodiments, the RNA-guided nuclease may be a nickase, and optionally lacks RuvC activity. In certain embodiments, the genome editing system may comprise first and second RNA-guided nucleases. In certain embodiments, the first and second RNA-guided nucleases may be complexed with the first and second guide RNAs, respectively, forming first and second ribonucleoprotein complexes. In certain embodiments, the genome editing system may further comprise a third guide RNA; and optionally a fourth guide RNA, wherein the third and fourth guide RNAs may comprise third and fourth targeting domains complimentary to third and fourth sequences on opposite sides of positions of a GATA1 binding motif in BCL11A erythroid enhancer (BCL11Ae) of a human BCL11A gene, wherein one or both of the third and fourth sequences optionally overlaps the GATA1 binding motif in BCL11Ae of the human BCL11A gene. In certain embodiments, the genome editing system may further comprise a nucleic acid template encoding a deletion of the GATA1 binding motif in BCL11Ae. In certain embodiments, the RNA-guided nuclease may be an S. pyogenes Cas9. In certain embodiments, the RNA-guided nuclease may be a nickase, and optionally lacks RuvC activity. In certain embodiments, the third targeting domain may be complimentary to a sequence within 1000 nucleotides upstream of the GATA1 binding motif in BCL11Ae. In certain embodiments, the third targeting domain may be complimentary to a sequence within 100 nucleotides upstream of the GATA1 binding motif in BCL11Ae. In certain embodiments, one of the third and fourth targeting domains may be complimentary to a sequence within 100 nucleotides downstream of the GATA1 binding motif in BCL11Ae. In certain embodiments, the fourth targeting domain may be complimentary to a sequence within 50 nucleotides downstream of the GATA1 binding motif in BCL11Ae. In certain embodiments, genome editing system may comprise first and second RNA-guided nucleases. In certain embodiments, the first and second RNA-guided nucleases may be complexed with the third and fourth guide RNAs, respectively, forming third and fourth ribonucleoprotein complexes.

[0072] In one aspect, the disclosure relates to a method of altering a cell comprising contacting a cell with a genome editing system. In certain embodiments, the step of contacting the cell with the genome editing system may comprise contacting the cell with a solution comprising first and second ribonucleoprotein complexes. In certain embodiments, the step of contacting the cell with the solution may further comprise electroporating the cells, thereby introducing the first and second ribonucleoprotein complexes into the cell. In certain embodiments, the method of altering a cell may further comprise contacting the cell with a genome editing system, wherein the step of contacting the cell with the genome editing system may comprise contacting the cell with a solution comprising first, second, third, and optionally, fourth ribonucleoprotein complexes. In certain embodiments, the step of contacting the cell with the solution may further comprise electroporating the cells, thereby introducing the first, second, third, and optionally, fourth ribonucleoprotein complexes into the cell. In certain embodiments, the cell may be capable of differentiating into an erythroblast, erythrocyte, or a precursor of an erythrocyte or erythroblast. In certain embodiments, the cell may be a CD34+ cell.

[0073] In one aspect, the disclosure relates to a CRISPR-mediated method of altering a cell, comprising: introducing a first DNA single strand break (SSB) or double strand break (DSB) within a genome of the cell between positions c.−106 to −120 of a human HBG1 or HBG2 gene; and optionally introducing a second SSB or DSB within the genome of the cell between positions c.−106 to −120 of the human HBG1 or HBG2 gene, wherein the first and second SSBs or DSBs may be repaired by the cell in a manner that alters a CCAAT box target region of the human HBG1 or HBG2 gene. In certain embodiments, the first and second SSBs or DSBs may be repaired by the cell in a manner that results in the alteration of a CCAAT box target region of the human HBG1 or HBG2 gene. In certain embodiments, the CRISPR-mediated method may further comprise a template nucleic acid encoding the alteration of the CCAAT box target region of a human HBG1, HBG2 gene, or a combination thereof. In certain embodiments, the template nucleic acid may be a single stranded oligodeoxynucleotide (ssODN). In certain embodiments, the ssODN may comprise a 5′ homology arm, a replacement sequence, and a 3′ homology arm. In certain embodiments, the ssODNs may be a positive or negative strand. In certain embodiments, the alteration may be a non-naturally occurring alteration. In certain embodiments, the first and second SSBs or DSBs may be repaired by the cell in a manner that results in the formation of at least one of an indel, a deletion, or an insertion in the CCAAT box target region of the human HBG1 or HBG2 gene. In certain embodiments, the CCAAT box target region may comprise a 18 nt target region, a 11 nt target region, a 4 nt target region, a 1 nt target region, or a combination thereof. In certain embodiments, the 5′ homology arm may be about 25 to about 200 nucleotides or more in length, e.g., at least about 25, 50, 75, 100, 125, 150, 175, or 200 nucleotides in length; the replacement sequence may comprise 0 nucleotides in length; and the 3′ homology arm may be about 25 to about 200 nucleotides or more in length, e.g., at least about 25, 50, 75, 100, 125, 150, 175, or 200 nucleotides in length. In certain embodiments, the 5′ homology arm may comprise about 50 to 100 bp, e.g., 55 to 95, 60 to 90, 70 to 90, or 80 to 90 bp, homology 5′ of the 18 nt target region, the 11 nt target region, the 4 nt target region, or the 1 nt target region and the 3′ homology arm may comprise about 50 to 100 bp, e.g., 55 to 95, 60 to 90, 70 to 90, or 80 to 90 bp, homology 3′ of 18 nt target region, the 11 nt target region, the 4 nt target region, or the 1 nt target region. In certain embodiments, the ssODN may comprise, may consist essentially of, or may consist of a sequence selected from the group consisting of SEQ ID NO:974, SEQ ID NO:975, SEQ ID NO:976, SEQ ID NO:978, SEQ ID NO:984, SEQ ID NO:985, SEQ ID NO:986, SEQ ID NO:987, SEQ ID NO:988, SEQ ID NO:989, SEQ ID NO:990, SEQ ID NO:991, SEQ ID NO:992, SEQ ID NO:993, SEQ ID NO:994, SEQ ID NO:995, SEQ ID NO:982 and SEQ ID NO:983. In certain embodiments, the alteration may be a non-naturally occurring alteration. In certain embodiments, the first and second SSBs or DSBs may be repaired by the cell in a manner that results in the formation of at least one of an indel, a deletion, or an insertion in the CCAAT box target region of the human HBG1 or HBG2 gene. In certain embodiments, the CCAAT box target region may comprise a 13 nt target region, −117G>A target region, or a combination thereof. In certain embodiments, the alteration may comprise a 13 nt deletion at the 13 nt target region or a substitution from G to A at the −117G>A target region, or a combination thereof. In certain embodiments, the 5′ homology arm may comprise about 50 to 100 bp, e.g., 55 to 95, 60 to 90, 70 to 90, or 80 to 90 bp, homology 5′ of the 13 nt target region or the −117G>A target region and the 3′ homology arm may comprise about 50 to 100 bp, e.g., 55 to 95, 60 to 90, 70 to 90, or 80 to 90 bp, homology 3′ of the 13 nt target region or the −117G>A target region. In certain embodiments, the ssODN may comprise, may consist essentially of, or may consist of a sequence selected from the group consisting of SEQ ID NO:977 or SEQ ID NO:979. SEQ ID NO:980 or SEQ ID NO:981.

[0074] In one aspect, the disclosure relates to a composition that may comprise a plurality of cells generated by a method of altering a cell disclosed herein, wherein at least 20%, 30%, 40%, 50%, 60%, 70%, 80% or 90% of the cells may comprise an alteration of a sequence of a CCAAT box target region of the human HBG1 gene, HBG2 gene, or a combination thereof. In certain embodiments, the alteration may comprise a 18 nt deletion, a 11 nt deletion, a 4 nt deletion, a 1 nt deletion, a 13 nt deletion, a substitution from G to A at the −117, of the human HBG1 gene, HBG2 gene, or a combination thereof. In certain embodiments, at least a portion of the plurality of cells may be within an erythroid lineage. In certain embodiments, the plurality of cells may be characterized by an increased level of fetal hemoglobin expression relative to an unmodified plurality of cells. In certain embodiments, the level of fetal hemoglobin may be increased by at least 20%, 30%, 40%, 50%, 60%, 70%, 80% or 90%. In certain embodiments, the composition may further comprise a pharmaceutically acceptable carrier.

[0075] In one aspect, the disclosure relates to a cell comprising a synthetic genotype generated by a method of altering a cell disclosed herein, wherein the cell may comprise a 18 nt deletion, a 11 nt deletion, a 4 nt deletion, a 1 nt deletion, a 13 nt deletion, a substitution from G to A at the −117, of the human HBG1 gene, HBG2 gene, or a combination thereof.

[0076] In one aspect, the disclosure relates to a cell comprising at least one allele of the HBG locus generated by a method of altering a cell disclosed herein, wherein the cell may encode a 18 nt deletion, a 11 nt deletion, a 4 nt deletion, a 1 nt deletion, a 13 nt deletion, a substitution from G to A at the −117, of the human HBG1 gene, HBG2 gene, or a combination thereof.

[0077] In one aspect, the disclosure relates to an AAV vector that may comprise a template nucleic acid encoding a non-naturally occurring alteration of a CCAAT box target region of a human HBG1, HBG2 gene, or a combination thereof. In certain embodiments, the template nucleic acid may be a single stranded oligodeoxynucleotide (ssODN). In certain embodiments, the CCAAT box target region may comprise a 18 nt target region, a 11 nt target region, a 4 nt target region, a 1 nt target region, or a combination thereof. In certain embodiments, the ssODN may comprise a 5′ homology arm, a replacement sequence, and a 3′ homology arm. In certain embodiments, the 5′ homology arm may be about 25 to about 200 or more nucleotides in length, e.g., at least about 25, 50, 75, 100, 125, 150, 175, or 200 nucleotides in length; the replacement sequence may comprise 0 nucleotides in length; and the 3′ homology arm may be about 25 to about 200 or more nucleotides in length, e.g., at least about 25, 50, 75, 100, 125, 150, 175, or 200 nucleotides in length. In certain embodiments, the 5′ homology arm may comprise about 50 to 100 bp, e.g., 55 to 95, 60 to 90, 70 to 90, or 80 to 90 bp, homology 5′ of the 18 nt target region, the 11 nt target region, the 4 nt target region, or the 1 nt target region and the 3′ homology arm may comprise about 50 to 100 bp, e.g., 55 to 95, 60 to 90, 70 to 90, or 80 to 90 bp, homology 3′ of 18 nt target region, the 11 nt target region, the 4 nt target region, or the 1 nt target region. In certain embodiments, the ssODN may comprise, may consist essentially of, or may consist of a sequence selected from the group consisting of SEQ ID NO:974-976, SEQ ID NO:978, SEQ ID NO:982-995.

[0078] In one aspect, the disclosure relates to a nucleotide sequence comprising a template nucleic acid encoding a non-naturally occurring alteration of a CCAAT box target region of a human HBG1, HBG2 gene, or a combination thereof. In certain embodiments, the template nucleic acid may be a single stranded oligodeoxynucleotide (ssODN) or a double stranded oligodeoxynucleotide (dsODN) comprising the alteration. In certain embodiments, the CCAAT box target region may comprise a 18 nt target region, a 11 nt target region, a 4 nt target region, a 1 nt target region, or a combination thereof. In certain embodiments, the ssODN may comprise a 5′ homology arm, a replacement sequence, and a 3′ homology arm. In certain embodiments, the 5′ homology arm may be about 25 to about 200 or more nucleotides in length, e.g., at least about 25, 50, 75, 100, 125, 150, 175, or 200 nucleotides in length; the replacement sequence may comprise 0 nucleotides in length; and the 3′ homology arm may be about 25 to about 200 or more nucleotides in length, e.g., at least about 25, 50, 75, 100, 125, 150, 175, or 200 nucleotides in length. In certain embodiments, the 5′ homology arm may comprise about 50 to 100 bp, e.g., 55 to 95, 60 to 90, 70 to 90, or 80 to 90 bp, homology 5′ of the 18 nt target region, the 11 nt target region, the 4 nt target region, or the 1 nt target region and the 3′ homology arm may comprise about 50 to 100 bp, e.g., 55 to 95, 60 to 90, 70 to 90, or 80 to 90 bp, homology 3′ of 18 nt target region, the 11 nt target region, the 4 nt target region, or the 1 nt target region. In certain embodiments, the ssODN may comprise, may consist essentially of, or may consist of a sequence selected from the group consisting of SEQ ID NO:974-976, SEQ ID NO:978, SEQ ID NO:982-995.

[0079] In one aspect, the disclosure relates to a cell comprising a synthetic genotype, wherein the cell may comprise a 18 nt deletion, a 11 nt deletion, a 4 nt deletion, a 1 nt deletion, a 13 nt deletion, a substitution from G to A at the −117, of the human HBG1 gene, HBG2 gene, or a combination thereof.

[0080] In one aspect, the disclosure relates to a composition, comprising a population of cells generated by a method of altering a cell disclosed herein, wherein the cells comprise a higher frequency of an alteration of a sequence of a CCAAT box target region of the human HBG1 gene, HBG2 gene, or a combination thereof relative to an unmodified population of cells. In certain embodiments, the higher frequency is at least about 10%, 20%, 30%, 40%, 50%, 60%, 70%, 80% or 90% higher. In certain embodiments, the alteration comprises a 18 nt deletion, a 11 nt deletion, a 4 nt deletion, a 1 nt deletion, a 13 nt deletion, a substitution from G to A at the −117, of the human HBG1 gene, HBG2 gene, or a combination thereof. In certain embodiments, at least a portion of the population of cells are within an erythroid lineage.

[0081] This listing is intended to be exemplary and illustrative rather than comprehensive and limiting. Additional aspects and embodiments may be set out in, or apparent from, the remainder of this disclosure and the claims.

### BRIEF DESCRIPTION OF THE DRAWINGS

[0082] The accompanying drawings are intended to provide illustrative, and schematic rather than comprehensive, examples of certain aspects and embodiments of the present disclosure. The drawings are not intended to be limiting or binding to any particular theory or model, and are not necessarily to scale. Without limiting the foregoing, nucleic acids and polypeptides may be depicted as linear sequences, or as schematic two- or three-dimensional structures; these depictions are intended to be illustrative rather than limiting or binding to any particular model or theory regarding their structure.

[0083] FIG. 1 depicts, in schematic form, HBG1 and HBG2 gene(s) in the context of the β-globin gene cluster on human chromosome 11. FIG. 1. Each gene in the β-globin gene cluster is transcriptionally regulated by a proximal promoter. While not wishing to be bound by any particular theory, it is generally thought that A_{γ} and/or G_{γ} expression is activated by engagement between the proximal promoter with the distal strong erythroid-specific enhancer, the locus control region (LCR). Long-range transactivation by the LCR is thought to be mediated by alteration of chromatin configuration/confirmation. The LCR is marked by 4 erythroid specific Dnase I hypersensitive sites (HS1-4) and 2 distal enhancer elements (5′ HS and 3′ HS1). β-like gene globin gene expression is regulated in a developmental stage-specific manner, and expression of globin genes changes coincide with changes in the main site of blood production.

[0084] FIGS. 2A-2B depict HBG1 and HBG2 genes, coding sequences (CDS) and small deletions and point mutations in and upstream of the HBG1 and HBG2 proximal promoters that have been identified in patients and associated with elevation of fetal hemoglobin (HbF). Core elements within the proximal promoters (CAAT box, 13 nt sequence) that have been deleted in some patients with hereditary persistence of fetal hemoglobin (HPFH). The ‘target sequence’ region of each locus, which has been screened for gRNA binding target sites, is also identified.

[0085] FIG. 3 depicts gene editing of HBG of mPB CD34+ cells electroporated with variants of Acidaminococcus sp. Cpf1 (“AsCpf1”), namely His-AsCpf1-nNLS (SEQ ID NO: 1000) and His-AsCpf1-sNLS-sNLS (SEQ ID NO: 1001) complexed with the guide RNA HBG1-1 (OLI3620) (Table 6) (“His-AsCpf1-nNLS_HBG1-1 RNP” and “His-AsCpf1-sNLS-sNLS_HBG1-1 RNP”). The RNP were electroporated at 5 μM or 20 μM.

[0086] FIGS. 4A-4C depict gene editing of HBG of mPB CD34+ cells electroporated with His-AsCpf1-sNLS-sNLS_HBG1-1 RNP alone or with various ssODNs. FIG. 4A depicts the percentage of indels detected by sequencing the HBG PCR product 72 hours after electroporation with His-AsCpf1-sNLS-sNLS_HBG1-1 RNP alone or with OLI164324 (“−4 nt-strand”), OLI16430 (“−4 nt+strand”), OLI16410 (“−18 nt-strand”), or OLI16409 (“−18 nt+ strand”) (Table 7). FIG. 4B depicts the percentage of the precise 18 nucleotide deletion indels detected by sequencing the HBG PCR product 72 hours after electroporation with His-AsCpf1-sNLS-sNLS_HBG1-1 RNP alone or with OLI16410 (“−18 nt-strand”) or OLI16409 (“−18 nt+ strand”). FIG. 4C depicts the percentage of the precise 18 nt deletion within all indels detected by sequencing the HBG PCR product 72 hours after electroporation with His-AsCpf1-sNLS-sNLS_HBG1-1 RNP alone or with OLI16410 (“−18 nt-strand”) or OLI16409 (“−18 nt+ strand”).

[0087] FIGS. 5A-5F depict schematics of the HBG1-1 target region and S. pyogenes Cas9 gRNA pairs used in combination. FIG. 5A shows the target region of HBG1-1 gRNA (comprising the RNA targeting domain set forth in SEQ ID NO: 1002, Table 9). The distal CCAAT box of HBG promoter (i.e., HBG1/2 c.−111 to −115) is indicated by a grey box. FIG. 5B shows the target region of HBG1-1, the distal CCAAT box of HBG, and the target region SpA gRNA (comprising the targeting domain of SEQ ID NO:941, Table 9). FIG. 5C shows the target region of HBG1-1, the distal CCAAT box of HBG, and the target region SpG gRNA (comprising the targeting domain of SEQ ID NO:359, Table 9). FIG. 5D shows the target region of HBG1-1, the distal CCAAT box of HBG, the target region of tSpA dead gRNA (“dgRNA”) (comprising the targeting domain of SEQ ID NO:326, Table 9), and the target region of Sp182 dgRNA (comprising the targeting domain of SEQ ID NO:1028, Table 9). FIG. 5E shows the target region of HBG1-1, the distal CCAAT box of HBG, and tSpA dgRNA (comprising the targeting domain of SEQ ID NO:326, Table 9). FIG. 5F shows the target region of HBG1-1, the distal CCAAT box of HBG, and the target region of Sp182 dgRNA (comprising the targeting domain of SEQ ID NO:1028, Table 9).

[0088] FIGS. 6A-6B depict HbF expression achieved by ex vivo editing of mPB CD34+ cells using HBG1-1-AsCpf1-RNP targeting the HBG promotor region. FIG. 6A shows results of editing at the HBG promoter region following delivery of 5 μM or 20 μM HBG1-1-AsCpf1-RNP (“HBG-1-1”) via Amaxa electroporation in mPB CD34+ cells. Delivery of 20 μM HBG1-1-AsCpf1-RNP via Amaxa electroporation results in up to −43% editing, and 21% HbF induction (above background levels). HbF levels are represented by black circles depicting expression levels of gamma-globin chains over total beta-like globin chains (gamma chains/[gamma chains+beta chain]) as measured by UPLC analysis on the erythroid progeny of mPB CD34+ cells. Grey bars depict the percentage of indels 72 hours post-electroporation detected by next generation sequencing (NGS) of the HBG PCR product.

[0089] FIG. 6B shows results of editing at the HBG promoter region following delivery of 5 μM or 20 μM HBG1-1-AsCpf1-RNP (“HBG-1-1”) via MaxCyte electroporation in mPB CD34+ cells. Delivery of 20 μM HBG1-1-AsCpf1-RNP via MaxCyte electroporation results in up to −16% editing, and 7% HbF induction (above background levels). HbF levels are represented by black circles depicting expression levels of gamma-globin chains over total beta-like globin chains (gamma chains/[gamma chains+beta chain]) as measured by UPLC analysis on the erythroid progeny of mPB CD34+ cells. Grey bars depict the percentage of indels 72 hours post-electroporation detected by NGS of the HBG PCR product.

[0090] FIG. 7 depicts enhanced editing by HBG1-1-AsCpf1H800A-RNP at the HBG promotor region on the Maxcyte device by co-delivering various S. pyogenes Cas9 WT or Cas9D10A RNPs. “S.Py D10A” represents the Cas9 D10A nickase protein and “S.Py WT” represents the Cas9 WT protein. RNPs tested include SpA-D10A-RNP, SpG-D10A-RNP, tSpA-Cas9-RNP, Sp182-Cas9-RNP, and tSpA-Cas9-RNP+Sp182-Cas9-RNP (Table 8). Total editing at the HBG promoter region (grey bars) and the associated HbF protein induction (black circles) following delivery of HBG1-1-AsCpf1H800A-RNP alone (“HBG1-1”), or in combination with S. pyogenes Cas9 RNPs or pairs of RNP, is depicted. HbF levels are represented by black circles depicting expression levels of gamma-globin chains over total beta-like globin chains (gamma chains/[gamma chains+beta chain]) as measured by UPLC analysis on the erythroid progeny of mPB CD34+ cells. Grey bars depict the percentage of indels detected by NGS of the HBG PCR product.

[0091] FIG. 8 depicts viability of mPB CD34+ cells following MaxCyte delivery of HBG1-1-AsCpf1H800A-RNP alone (“HBG1-1”) or in combination with various S. pyogenes Cas9 WT or Cas9D10A RNPs. “S.Py D10A” represents the Cas9 D10A nickase protein and “S.Py WT” represents the Cas9 WT protein. RNPs tested include SpA-D10A-RNP, SpG-D10A-RNP, tSpA-Cas9-RNP, Sp182-Cas9-RNP, and tSpA-Cas9-RNP+Sp182-Cas9-RNP (Table 8). Viability was measured by DAPI staining and flow cytometry analysis at 24h post electroporation.

[0092] FIGS. 9A-9B depict the cleavage sites of HBG1-1-AsCpf1H800A-RNP and D10A-Cas9 RNP at the target region and the editing profile resulting from the co-delivery of the HBG1-1-AsCpf1H800A-RNP with a D10A RNP. FIG. 9A depicts the position of the HBG1-1-AsCpf1H800A-RNP cut sites on each strand of the target region (light grey arrows), as well as position of the nicking site targeted by the SpG-D10A-RNP and SpA-D10A-RNP (dark arrows) (Table 8). FIG. 9B depicts the editing profile resulting from the co-delivery of the HBG1-1-AsCpf1H800A-RNP (“HBG1-1 RNP”) with either SpG-D10A-RNP (“spG RNP”) or SpA-D10A-RNP (“spA RNP”) in mPB CD34+at 72h post-electroporation as detected by NGS analysis of the HBG PCR product (Table 8). The X-axis represents genomic position of the center of the indel relative to the HBG1-1-AsCpf1H800A-RNP positive strand cleavage site. The Y axis represents the length of the indel, where deletions are represented as negative values and insertions are represented as positive values. The total frequency of each indel is represented by the area of the symbol. Indels occurring at frequency equal or above 0.1% are depicted. The SpG and SpA target sites are indicated by dotted lines.

[0093] FIGS. 10A-10B depict that the co-delivery of Sp182-Cas9-RNP with HBG1-1-AsCpf1H800A-RNP results in a boost in total indels and in distal CCAAT box disrupting indels with no substantial alteration of the indel profile, as detected by NGS analysis of the HBG PCR product at 72h post-electroporation. FIG. 10A shows the indel profiles following editing with HBG1-1-AsCpf1H800A-RNP (“HBG1-1 RNP”) alone, or in combination with Sp182-Cas9-RNP (“sp182 RNP”). The X-axis represents genomic position of the center of the indel relative to the HBG1-1-AsCpf1H800A-RNP positive strand cleavage site. The Y axis represents the length of the indel, where deletions are represented as negative values and insertions are represented as positive values. The total frequency of each indel is represented by the area of the symbol. Indels occurring at frequency equal or above 0.1% are depicted. The Sp182 target site is indicated by a dotted line. FIG. 10B depicts the frequency of indels disrupting either none, 1 nt, 2 nt, 3 nt, 4 nt, or the entire 5 nt of the distal CCAAT box sequence.

[0094] FIG. 11 depicts that optimal doses of HBG1-1-AsCpf1H800A-RNP co-delivered with Sp182-Cas9-RNP result in an increase in total editing, and HbF production (Table 8). Delivery of HBG1-1-AsCpf1H800A-RNP (“HBG1-1”) as an RNP pair alongside Sp182-Cas9-RNP (“Sp182”), achieved >92% editing (grey bars) at the HBG promoter region with up to 34% HbF induction (above background) (black circles). No editing was observed when Sp182-Cas9-RNP was delivered alone at 12 μM. HbF levels are represented by black circles depicting expression levels of gamma-globin chains over total beta-like globin chains (gamma chains/[gamma chains+beta chain]) as measured by UPLC analysis on the erythroid progeny of mPB CD34+ cells. Grey bars depict the percentage of indels detected by NGS of the HBG PCR product.

[0095] FIG. 12 depicts the distribution of levels of gamma chain expression over total beta-like chains (gamma chains/[gamma chains+beta chain]) as measured by UPLC in the clonal erythroid progeny of single human mPB CD34+ cells edited at the HBG promotor region with HBG1-1-AsCpf1H800A-RNP in combination with Sp182-Cas9-RNP (Table 8). Each black circle represents the gamma-globin protein level detected in a clonal erythroid population derived from a single cell, isolated by FACS sorting at 48h post electroporation.

[0096] FIGS. 13A-13C depicts total editing, HbF production, viability, and colony forming potential after co-delivery of RNP containing modified HBG1-1 gRNA (SEQ ID NO:1041, Table 8) complexed to His-AsCpf1-sNLS-sNLS H800A (SEQ ID NO:1032, Table 8) (“His-AsCpf1-sNLS-sNLS H800A_HBG1-1 RNP,” represented as “HBG1-1” in FIGS. 13A-C) with increasing concentrations of ssODN OLI16431 (SEQ ID NO:1040, Table 7) (represented as “OLI16431” in FIGS. 13A-C) (Table 7). FIG. 13A depicts editing at the distal CAATT box (grey bars) and HbF induction (black circles) after co-delivery of 6 μM His-AsCpf1-sNLS-sNLS H800A_HBG1-1 RNP and increasing concentrations of ssODN OLI16431. HbF levels are represented by black circles depicting expression levels of gamma-globin chains over total beta-like globin chains (gamma chains/[gamma chains+beta chain]) as measured by UPLC analysis on the erythroid progeny of mPB CD34+ cells. Grey bars depict the percentage of indels detected by NGS of the HBG PCR product.

[0097] FIG. 13B depicts viability of mPB CD34+ cells following delivery of His-AsCpf1-sNLS-sNLS H800A_HBG1-1 RNP alone or in combination with increasing doses of ssODN OLI16431. Viability was measured by DAPI exclusion at 72 hours post electroporation. FIG. 13C depicts the hematopoietic activity of the “HBG1-1” RNP and ssODN OLI16431 treated and donor matched untreated control CD34+ cells in colony forming cell (CFC) assays. CFCs shown are per 800 CD34+ cells plated. The number and subtype of colonies are indicated (GEMM: granulocyte-erythroid-monocyte-macrophage colony (black), GM: granulocyte-macrophage colony (dark grey), E: erythroid colony (light grey)).

[0098] FIGS. 14A-14B depicts total editing, HbF production, and viability results using different concentrations of RNP containing unmodified HBG1-1 gRNA (SEQ ID NO:1022, Table 8) complexed to His-AsCpf1-sNLS-sNLS H800A (SEQ ID NO:1032, Table 8) (“His-AsCpf1-sNLS-sNLS H800A_HBG1-1 RNP,” represented as “HBG1-1” in FIGS. 14A-B) co-delivered with different concentrations of ssODN OLI16431 (SEQ ID NO:1040, Table 7) (represented as “OLI16431” in FIGS. 14A-B) (Table 7). FIG. 14A depicts editing at the distal CAATT box (black bars (48 hours) and light grey bars (14 days of erythroid culture)) and HbF induction (black circles) after co-delivery of His-AsCpf1-sNLS-sNLS H800A_HBG1-1 RNP (“HBG1-1”) and ssODN OLI16431 at varying concentrations. HbF levels are represented by black circles depicting expression levels of gamma-globin chains over total beta-like globin chains (gamma chains/[gamma chains+beta chain]) as measured by UPLC analysis on the erythroid progeny of mPB CD34+ cells. Bars depict the percentage of indels detected by NGS of the HBG PCR product at 48 hours (black) and 14 day erythroid culture (light grey) timepoints. FIG. 14B depicts viability of mPB CD34+ cells following delivery of His-AsCpf1-sNLS-sNLS H800A_HBG1-1 RNP alone (“HBG1-1”), ssODN OLI16431 alone, or in combination with varying doses of HBG1-1 and OLI16431. Viability was measured by DAPI exclusion at 48 hours post electroporation and after 14 days in erythroid culture. Following the editing of mPB CD34+ cells, ex vivo differentiation into the erythroid linage was performed for 18 days (Giarratana 2011). At day 14 of culture, a subset of cells were isolated and viability (DAPI exclusion) and editing (NGS of the HBG PCR product) measurements were taken.

[0099] FIG. 15 depicts editing by RNP in mPB CD34+ cells. RNPs included gRNA complexed with Cpf1 protein as set forth in Table 15. Illumina sequencing was performed on isolated genomic DNA at 72 hours post electroporation.

[0100] FIGS. 16A-16B depict editing in bulk CD34+ cell population (black bars), progenitor cells (light grey bars), and HSCs (dark grey bars), as determined by Illumina sequencing 48 hours post electroporation. FIG. 16A depicts RNP33 (Table 15) delivered alone or co-delivered with ssODN OLI16431 (SEQ ID NO:1040, Table 7). FIG. 16B depicts RNP33 (Table 15) delivered alone or co-delivered with Sp182 RNP (dead gRNA comprising SEQ ID NO:1027 (Table 8) complexed with S. pyogenes Cas9 (SEQ ID NO:1033)).

[0101] FIG. 17 depicts editing in bulk CD34+ cell population (black bars), progenitor cells (light grey bars), and HSCs (dark grey bars), as determined by Illumina sequencing 48 hours post electroporation. RNP34, RNP33, and RNP43 (Table 15) were delivered alone or in combination with Sp182 RNP (dead gRNA comprising SEQ ID NO: 1027 (Table 8) complexed with S. pyogenes Cas9 (SEQ ID NO: 1033)) or ssODN OLI16431 (SEQ ID NO:1040, Table 7).

[0102] FIG. 18 depicts editing in CD34+ cells as determined by Illumina sequencing 72 hours post electroporation. RNP64, RNP63, and RNP45 (Table 15) were delivered at a stoichiometry (gRNA:Cpf1 complexation ratio) of either 2, or 4, where the gRNA is in a molar excess.

[0103] FIG. 19 depicts editing in CD34+ cells as determined by Illumina sequencing 72 hours post electroporation. RNP33, RNP64, RNP63, and RNP45 (Table 15) were delivered alone or in combination with Sp182 RNP (dead gRNA comprising SEQ ID NO: 1027 (Table 8) complexed with S. pyogenes Cas9 (SEQ ID NO:1033)) or ssODN OLI16431 (SEQ ID NO: 1040, Table 7).

[0104] FIG. 20 depicts editing in CD34+ cells as determined by Illumina sequencing. RNPs comprising Cpf1 (SEQ ID: 1094) complexed to gRNAs with various 5′ DNA extensions (Table 15), were delivered alone or in combination with 8 μM OLI16431 (SEQ ID NO:1040, Table 7).

[0105] FIG. 21 depicts editing in CD34+ cells, as determined by Illumina sequencing. RNPs comprising gRNAs with matched 5′ ends (RNP49 vs RNP58 and RNP59 vs RNP60, Table 15) were delivered to CD34+ cells to assess the impact of 3′ modifications. In both comparisons, gRNAs with 3′ PS-OMe outperformed the unmodified 3′ version at 24 hours post electroporation.

[0106] FIGS. 22A-22B depict editing in CD34+ cells as determined by Illumina sequencing 24 and 48 hours post electroporation. RNP58 (Table 15) was delivered to CD34+ cells at a stoichiometry (gRNA:Cpf1 complexation ratio) of either 2:1, 1:1 or 0.5:1 molar ratios. At all doses tested, editing was best when RNP was complexed at 2:1 ratio.

[0107] FIGS. 23A-23B depict editing in CD34+ cells as determined by Illumina sequencing. FIGS. 45A and 45B depict RNPs comprising gRNAs with matched 5′ ends, but different 3′ modifications (Table 15) delivered to CD34+ cells to assess the impact of 3′ modifications or extensions.

[0108] FIGS. 24A-24C depict editing in CD34+ cells and their erythroid progeny, and HbF levels in the erythroid progeny following delivery of RNPs targeting various cut sites within the HBG locus. FIG. 24A depicts RNPs comprising guide RNAs containing an unmodified 5′ and 1×PS-Ome at the 3′ end (Table 15). FIG. 24B depicts RNPs comprising guide RNAs containing 2PS+20 DNA extension at the 5′ and 1×PS-Ome at the 3′ end (Table 15). FIG. 24C depicts RNPs comprising guide RNAs containing a 25 DNA extension at the 5′ and 1×PS-Ome at the 3′ end (Table 15).

[0109] FIG. 25 depicts editing and HbF levels in erythroid progeny of CD34+ cells following delivery of RNP58 at 1 μM, 2 μM, and 4 μM.

[0110] FIG. 26 depicts editing in CD34+ cells following Maxcyte electroporation of RNPs. RNP58, RNP26, RNP27, and RNP28 comprising gRNA SEQ ID:1051 complexed to different Cpf1 proteins (SEQ IDs: 1094, 1096, 1107, 1108) (Table 15) were delivered into CD34+ cells. Editing was determined by Illumina-sequencing 24 and 48 hours post electroporation.

[0111] FIG. 27 depicts editing in CD34+ cells following Maxcyte electroporation of RNPs. RNP58, RNP29, RNP30, and RNP31 comprising Cpf1 protein SEQ ID: 1094 complexed to guide RNAs with various 5′ extensions (Table 15) were delivered into CD34+ cells. Editing was determined by Illumina-seq 24 and 48 hours post electroporation. RNP30 was not tested (nt) at 1 μM due to limiting cell numbers.

[0112] FIG. 28 depicts editing in bulk CD34+ cell population (black bars), progenitor cells (dark grey bars), and HSCs (light grey bars), as determined by Illumina sequencing 48 hours post electroporation. RNP58, RNP27, and RNP26 (Table 15) were delivered to CD34+ cells at 2 μM or 4 μM.

[0113] FIG. 29 depicts editing in bulk CD34+ cell population (black bars), progenitor cells (dark grey bars), and HSCs (light grey bars), as determined by Illumina sequencing 48 hours post electroporation. RNP61, RNP62, and RNP34 (Table 15) (8 μM) were co-delivered to CD34+ cells with ssODN OLI16431 (SEQ ID NO: 1040, Table 7) (8 μM).

[0114] FIG. 30 depicts editing in bulk CD34+ cell population (black bars), progenitor cells (dark grey bars), and HSCs (light grey bars), as determined by Illumina sequencing 48 hours post electroporation. RNP58 and RNP32 (Table 15) were delivered to CD34+ cells at 2 μM.

[0115] FIG. 31 depicts editing in bulk CD34+ cell population (black bars), progenitor cells (dark grey bars), and HSCs (light grey bars), as determined by Illumina sequencing 48 hours post electroporation. RNP58 and RNP1 (Table 15) were delivered to CD34+ cells at 2 μM, 4 μM, or 8 μM. The cells edited with RNP1 at 2 μM were not sorted (N.S), and thus editing data is not available.

[0116] FIG. 32 depicts the indels of engrafted mPB CD34+ cells from BM of “NBSGW” mice 8 weeks post infusion of electroporated cells. RNP34 and RNP33 (Table 15) (8 μM) were co-delivered to CD34+ cells with ssODN OLI16431 (SEQ ID NO:1040, Table 7) (6 μM).

[0117] FIGS. 33A-33B depict the indels of engrafted mPB CD34+ cells and HbF expression by erythroid cells derived from chimeric BM of “NBSGW” mice 8 weeks post infusion of electroporated cells. RNP33 or RNP34 (Table 15) was co-delivered with Sp182 RNP (dead gRNA comprising SEQ ID NO:1027 (Table 8) complexed with S. pyogenes Cas9 (SEQ ID NO: 1033)) (16 μM total RNP) to CD34+ cells. FIG. 33A depicts the indel frequency in unfractionated bone marrow or flow-sorted individual populations of CD15+, CD19+, GlyA+, and Lin-CD34+ cells in mock-transfected (no RNP added) or RNP transfected cells. Lin-CD34+ cells are defined as CD34+ cells that are negative for CD3, CD14, CD15, CD16, CD19, CD20, and CD56) from bone marrow (BM) of nonirradiated NOD, B6.SCID Il2rγ−/− Kit(W41/W41) (“NBSGW”) mice infused with mock (no RNP) or RNP transfected mPB CD34+ cells. Indels were determined for each cell population by Illumina sequencing. FIG. 33B depicts the HbF expression, calculated by UPLC as gamma/beta-like (%) from erythroid cell lysates following an 18-day erythroid differentiation culture from total chimeric BM.

[0118] FIGS. 34A-34B depict the indels of engrafted mPB CD34+ cells and HbF expression by erythroid cells derived from chimeric BM of “NBSGW” mice 8 weeks post infusion of electroporated cells. RNP61 or RNP62 (Table 15) (8 μM) was co-delivered with ssODN OLI16431 (SEQ ID NO:1040, Table 7) (8 μM) to CD34+ cells. FIG. 34A depicts the indels of unfractionated bone marrow or flow-sorted individual populations of CD15+, CD19+, GlyA+, and Lin-CD34+ cells in mock-transfected (no RNP added) or RNP transfected cells. Lin-CD34+ cells are defined as CD34+ cells that are negative for CD3, CD14, CD15, CD16, CD19, CD20, and CD56) from bone marrow (BM) of nonirradiated NBSGW mice infused with mock (no RNP) or RNP transfected mPB CD34+ cells. Indels were determined for each cell population by Illumina sequencing. FIG. 34B depicts the HbF expression, calculated by UPLC as gamma/beta-like (%) by erythroid cells following an 18-day erythroid differentiation culture from total chimeric BM.

[0119] FIG. 35 depicts human chimerism within bone marrow 8 weeks post infusion with mock (no RNP added) mPB CD34+ cells, or mPB CD34+ cells edited with RNP1 (4 or 8 PM) or RNP58 (2, 4 or 8 μM) (Table 15). Human chimerism and lineage reconstitution (CD45+, CD14+, CD19+, glycophorin A (GlyA, CD235a+), lineage, and CD34+, and mouse CD45+ marker expression) in BM was determined by flow cytometry.

[0120] FIG. 36 depicts indels within unsorted bulk bone marrow 8 weeks post infusion with mock (no RNP added) mPB CD34+ cells, or mPB CD34+ cells edited with RNP1 (4 or 8 μM) or RNP58 (2, 4 or 8 μM) (Table 15). Indels were determined by Illumina sequencing.

[0121] FIG. 37 depicts the indel frequency in unfractionated bone marrow or flow-sorted individual populations of CD15+, CD19+, GlyA+, and Lin-CD34+ cells in mock-transfected (no RNP added) or RNP transfected cells. Lin-CD34+ cells are defined as CD34+ cells that are negative for CD3, CD14, CD15, CD16, CD19, CD20, and CD56 from bone marrow (BM) of nonirradiated NOD, B6.SCID Il2rγ−/− Kit(W41/W41) (“NBSGW”) mice infused with mock (no RNP) or RNP transfected mPB CD34+ cells. Indels were determined for each cell population by Illumina sequencing.

[0122] FIG. 38 depicts HbF from GlyA+ fraction isolated from bone marrow at 8 weeks post infusion with mock (no RNP added) mPB CD34+ cells, or mPB CD34+ cells edited with RNP58 (2, 4 or 8 μM) (Table 15).

[0123] FIG. 39 depicts colony forming potential of cells from bone marrow flushes taken 8 weeks post infusion of mock or edited human mobilized CD34+ cells. The number and subtype of colonies are indicated (GEMM: granulocyte-erythroid-monocyte-macrophage colony (black), GM: granulocyte-macrophage colony (dark grey), E: erythroid colony (light grey)).

[0124] FIG. 40 depicts the sequences of Cpf1 protein variants set forth in Table 14. Nuclear localization sequences are shown as bolded letters, six-histidine sequences are shown as underlined letters. Additional permutations of the identity and N-terminal/C-terminal positions of NLS sequences, e.g., appending two or more nNLS sequences or combinations of nNLS and sNLS sequences (or other NLS sequences) to either the N-terminal/C-terminal positions, as well as sequences with and without purification sequences, e.g., six-histidine sequences, are within the scope of the instantly disclosed subject matter.

[0125] FIGS. 41A-41E depict editing in the HBG distal CCAAT box region. FIG. 41A shows a schematic of the Cpf1 (RNP34, Table 15) and SpCas9 (Sp35 RNP) cleavage sites at the HBG distal CCAAT box region. Sp35 RNP comprises Sp35 gRNA (comprising the targeting domain of SEQ ID NO:339 (i.e., CUUGUCAAGGCUAUUGGUCA (RNA)); SEQ ID NO:917 (i.e., CTTGTCAAGGCTATTGGTCA (DNA)) complexed with S. pyogenes wildtype (Wt) Cas9 protein. The dark grey jagged line with arrows marks the expected 4 nucleotide 5′ overhang after cutting with RNP34. The grey dotted line marks the expected cut site of RNP34. This is the expected cut site for any RNP containing a gRNA comprising the gRNA targeting domain sequence UAAUUUCUACUCUUGUAGAUCCUUGUCAAGGCUAUUGGUC (SEQ ID NO:1022). The Sp35 RNP expected cut site is indicated by the grey straight line with arrows. FIG. 41B depicts the percentage of indels derived from NHEJ and MMEJ repair in the CD34+ cell population, progenitor cells, and HSCs. MMEJ indels are represented by the black striped bar and NHEJ indels are represented by the white bar. FIG. 41C and FIG. 41D depicts the G-gamma chain expression levels (percentage of G-gamma chain/[total beta-like chains]) in erythroid cells derived from mPB CD34+ cells electroporated with Sp35 RNP or RNP34+Sp182RNP; carrying indels ≤3 bp or >3 bp in length on their HBG allele encoding for G-gamma. Only clones with a monoalleleic 4.9 kb deletion (resulting in no g-gamma expression from one of the chromosome) were analyzed to ensure a single HBG allele was driving the g-gamma expression. Thus, the expression level shown represents the level of g-gamma expression by a single HBG gene, depending on the indel carried at the promoter, in cells that have the g-gamma gene on the other chromosome deleted. FIG. 41C shows the results grouped by indel ≤3 bp or >3 bp in length. FIG. 41D depicts the gamma chain expression levels (percentage of gamma chains/[total beta-like chains]) in erythroid cells derived from mPB CD34+ cells electroporated with Sp35 RNP or RNP34+Sp182 RNP producing indels <3 bp or >3 bp in length. The position of the deletion is indicated on the X axis. Xs indicate indels generated by Cas9 (Sp35 RNP) and circles indicate edits generated by Cpf1 (RNP34). FIG. 41E depicts the distribution of levels of gamma chain expression over total beta-like chains (gamma chains/[gamma chains+beta chain]) as measured by UPLC in the clonal erythroid progeny of single human mPB CD34+ cells edited at the HBG promotor region with spCas9 RNP “sp35” or Cpf1 RNP34 (HBG1-1-AsCpf1H800A-RNP) in combination with “booster element” Sp182-Cas9-RNP (Table 8). Each black circle represents the gamma-globin protein level detected in a clonal erythroid population derived from a single cell, isolated by FACS sorting at 48h post electroporation. The error bars show the median and interquartile range.

[0126] FIGS. 42A-42J depict editing via Cpf1 or SpCas9 enzyme cleavage. FIG. 42A depicts the percentage of NHEJ mediated indels at the distal CCAAT box resulting from RNP58 (Cpf1) (Table 15) or Sp35 RNP (SpCas9) editing. Indel size is indicated by the x-axis. FIG. 42B depicts the percentage of >3 bp NHEJ mediated indels, >3 bp MMEJ mediated indels, and <3 bp indels at the distal CCAAT box resulting from editing by Cpf1 or SpCas9 RNP. For Sp35 RNP Cas9 indels in FIG. 42B (left pie chart): NHEJ >3 bp=21.42%; ≤3 bp=48.84%; MMEJ >3 bp=29.74%. For RNP58 Cpf1 indels in FIG. 42B (right pie chart): NHEJ >3 bp=64.86%; ≤3 bp=11.11%; MMEJ >3 bp=24.02%. FIG. 42C shows the wild type (wt) allele and top 18 indels, together with their average percentages in indel for all the samples, and their corresponding final sequences after the edit. Dashes represent deleted bases and the vertical line is the cut site (see also FIG. 55A). The long dark grey line above the wt allele marks the DNA sequence of the gRNA targeting domain of the gRNA of RNP58 (i.e., CCUUGUCAAGGCUAUUGGUCA (SEQ ID NO:1254)), and the shorter black line marks the distal CCAAT box (appearing reverse complemented here). Base distances with respect to TSS are marked by arrows. The grey boxes represent regions of homology which indicate MMEJ repair. FIG. 42D shows the wild type (wt) allele and top 18 indels, together with their average percentages in indel for all the samples, and their corresponding final sequences after the edit. Dashes represent deleted bases and the vertical line is the cut site (see also FIG. 55A). The long dark grey line above the wt allele marks the DNA sequence of the gRNA targeting domain of the gRNA of Sp35 RNP (i.e., CUUGUCAAGGCUAUUGGUCA SEQ ID NO:339), and the short black line marks the distal CCAAT box (appearing reverse complemented here). Base distances with respect to TSS are marked by arrows. The grey boxes represent regions of homology which indicate MMEJ repair. FIG. 42E shows the percentage of bases deleted along the target region in samples edited with RNP58 or Sp35 RNP. The black line represents RNP58 editing and the dashed line represents Sp35 RNP editing. The target region DNA sequence is shown on the x axis. The grey line marks the DNA sequence of the gRNA targeting domain of the gRNA of Sp35 RNP (i.e., CUUGUCAAGGCUAUUGGUCA SEQ ID NO:339), and the short black line marks the distal CCAAT box (appearing reverse complemented here). FIG. 42F shows the normalized profiles (each with a maximum value of 1) for the detected deletions at each base on the target region in samples edited with RNP58 or Sp35 RNP. The black line represents RNP58 editing and the dashed line represents Sp35 RNP editing. The target region DNA sequence is shown on the x axis. The grey line marks the DNA sequence of the gRNA targeting domain of the gRNA of Sp35 RNP (i.e., CUUGUCAAGGCUAUUGGUCA SEQ ID NO:339), and the short black line marks the distal CCAAT box (appearing reverse complemented here). FIG. 42G shows the percentage of detected indels as a function of the deletion size (negative values on the x axis) or insertion (positive values in the x axis). The black line represents RNP58 editing and the dashed line represents Sp35 RNP editing. FIG. 42H shows the percentage of detected indels at each position in the target region. Sp35 RNP is represented by the dashed line. RNP58 is represented by the solid line. The target region DNA sequence is shown on the x axis. The gray line marks the DNA sequence of the gRNA targeting domain of the gRNA of Sp35 RNP (i.e., CUUGUCAAGGCUAUUGGUCA SEQ ID NO:339), and the short black line marks the distal CCAAT box (appearing reverse complemented here). FIG. 42I shows the frequency correlation for shared indels detected at ≥0.1% in either Sp35 RNP or RNP58 edited cells. FIG. 42J frequency correlation for all indels detected in at least one of the samples. Indels not detected in Sp35 RNP-edited cells are shown to the left of the vertical line at 1E−5. Indels not detected in RNP58-edited cells are shown to the bottom of the horizontal line at 1E−5. Triangles represent deletions ≤3 bp and circles represent deletions >3 bp.

[0127] FIGS. 43A-43O depict RNP32 editing resulting in long term engraftment, indel maintenance, and high HbF induction in vivo. FIG. 43A depicts the percentage of >3 bp NHEJ mediated indels, >3 bp MMEJ mediated indels, and ≤3 bp indels at the distal CCAAT box resulting from editing by RNP32 24 hours following electroporation: NHEJ >3 bp=66.10%; ≤3 bp=12.60%; MMEJ >3 bp =27.10%. FIG. 43B depicts the percentage of >3 bp NHEJ mediated indels, >3 bp MMEJ mediated indels, and <3 bp indels at the distal CCAAT box resulting from editing by RNP32 48 hours following electroporation: NHEJ >3 bp=65.30%; ≤3 bp=12.70%; MMEJ >3 bp=27.80%. FIG. 43C depicts the percentage of >3 bp NHEJ mediated indels, >3 bp MMEJ mediated indels, and <3 bp indels at the distal CCAAT box resulting from editing by RNP32 72 hours following electroporation: NHEJ >3 bp=64.70%; ≤3 bp=11.90%; MMEJ >3 bp=29.20%. FIG. 43D depicts the percentage of indels at the distal CCAAT box mediated via NHEJ repair resulting from editing by RNP32 24, 48, and 72 hours following electroporation and preinfusion. FIG. 43E depicts the percentage of indels at the distal CCAAT box mediated via NHEJ repair resulting from editing by RNP32 24 hours following electroporation and preinfusion. FIG. 43F depicts the percentage of indels at the distal CCAAT box mediated via NHEJ repair resulting from editing by RNP32 48 hours following electroporation and preinfusion. FIG. 43G depicts the percentage of indels at the distal CCAAT box mediated via NHEJ repair resulting from editing by RNP32 72 hours following electroporation and preinfusion. FIG. 43H depicts the percentage of all indels at the distal CCAAT box resulting from editing by RNP32 24, 48, and 72 hours following electroporation and preinfusion. FIG. 43I depicts the percentage of all indels at the distal CCAAT box from editing by RNP32 24 hours following electroporation and preinfusion. FIG. 43J depicts the percentage of all indels at the distal CCAAT box resulting from editing by RNP32 48 hours following electroporation and preinfusion. FIG. 43K depicts the percentage of all indels at the distal CCAAT box resulting from editing by RNP32 72 hours following electroporation and preinfusion. FIG. 43L depicts the percentage of indels in pre-infused RNP32 edited mPB CD34+ cells (“Preinfusion”) and long-term repopulating CD34+ cells from NBSGW mice following infusion of RNP32 edited mPB CD34+ cells and 16 weeks engraftment (“BM”). FIG. 43M depicts human chimerism within bone marrow 16 weeks post infusion with mock (no RNP added) mPB CD34+ cells or mPB CD34+ cells edited with RNP32 (Table 15). Human chimerism and lineage reconstitution (CD19+, CD15+, CD235A+), lineage, and CD34+, and mouse CD45+ marker expression) in BM was determined by flow cytometry. FIG. 43N depicts the percentage of F positive cells in mock (no RNP added) and CD235a+(GlyA+) erythroid cells, derived from RNP32 edited CD34+ cells. FIG. 43O depicts the percentage of HbF shown by expression levels of gamma-globin chains over total beta-like globin chains (gamma chains/[gamma chains+beta chain]) as measured by UPLC analysis of CD235a+(GlyA+) erythroid cells. FIGS. 44A-44B depict high polyclonality in NBSGW mice infused with RNP32 edited CD34+ cells. FIG. 44A shows high polyclonality over a 20 week period (8, 12, 16, and 20 weeks post-infusion) in the blood of mice (Mouse A, Mouse B, Mouse C, Mouse D) infused with RNP32 edited CD34+ cells. “0” represents data from pre-infused RNP32 edited mPB CD34+ cells. FIG. 44B shows high polyclonality in the bone marrow (BM) of NBSGW mice infused with RNP32 edited CD34+ cells at 20 weeks post-engraftment. In FIGS. 44A and 44B, each shade of grey within the graphical depiction represents a different indel signature, with the most frequent indel type located near the x-axis and the least frequent indel type located near the top of the plot.

[0128] FIG. 45 shows a schematic of the β-globin locus. “CD34+ cells^{a}”, means CD34+ hematopoietic stem and progenitor cells, “HS” means hypersensitive site, “LCR” means locus control region, “TSS” means transcriptional start site.

[0129] FIG. 46A shows viability of normal and SCD CD34+ cells at Days 1 to 3 post electroporation with 6 μM of RNP32 compiled from two independent experiments. Individual data points and mean for each treatment group are shown. N=4 for normal donors; N=5 for sickle donors (CEL238-001 [normal CD34+ cells] and CEL211-001 [SCD CD34+ cells] were each tested twice). FIG. 46B shows CD34+ cell viability post-electroporation with RNP32. ^{a} indicates only applicable to RNP32-electroporated cells. ^{b} indicates insufficient number of cells available and thus viability was not assessed.

[0130] FIG. 47A shows indel levels of normal and SCD CD34+ cells at Days 1 to 3 post electroporation with 6 μM of RNP32 compiled from two independent experiments. Individual data points and mean for each treatment group are shown. N=4 for normal donors; N=5 for sickle donors. (CEL238-001 [normal CD34+ cells] and CEL211-001 [SCD CD34+ cells] were each tested twice. Indel=insertions and/or deletions. FIG. 47B shows comparable and efficient editing in RNP32 edited CD34+ cells from normal donors and patients with SCD. The percentage of indels was evaluated in unedited and RNP32 edited CD34+ cells from normal donors (n=3) and from unedited and RNP32 edited CD34+ cells from patients with SCD (n=4). Unedited cells did not undergo electroporation.

[0131] FIG. 47C shows indel levels of CD34+ cells post-electroporation with RNP32. ND=Not Determined (Insufficient sample to run sequencing analysis).

[0132] FIGS. 48A-48D depict PCR Primers and mixes for digital droplet polymerase chain reaction (ddPCR). FIG. 48A depicts a schematic representation of ddPCR primers and probe positions relative to RNP32 cut sites. FIG. 48B shows the primers and probe sequences for 4.9 kb fragment deletion assessment. FIG. 48C shows the Master Mix 1 and 2 compositions for ddPCR Assay 6 and 9. FIG. 48D shows the Master Mix 3 composition.

[0133] FIG. 49A shows the frequency of 4.9 kb fragment deletion of normal and SCD CD34+ cells at Day 1 post electroporation with 6 μM of RNP32. Data are from 1 study (SCD014). Each dot represents 1 sample. Untreated cells did not undergo electroporation. FIG. 49B shows the frequency of 4.9 kb deletion in CD34+ cells post-electroporation with RNP32. NA=data not available as digital droplet polymerase chain reaction assays failed. Untreated cells did not undergo electroporation.

[0134] FIG. 50A shows fold expansion of erythroid progeny of CD34+ cells. Normal and SCD CD34+ cells, either untreated or electroporated with 6 μM of RNP32, were placed in erythroid-inducing conditions for 18 days. Data were compiled from 2 independent experiments. Each dot represents 1 sample. FIG. 50B shows enucleation frequency of erythroid progeny of CD34+ cells. Normal and SCD CD34+ cells, either untreated or electroporated with 6 μM of RNP32, were placed in erythroid-inducing conditions for 18 days. Data were compiled from 2 independent experiments. Each dot represents 1 sample.

[0135] FIG. 51A shows an assessment of HbF induction in erythroid progeny in two experiments. Normal and SCD CD34+ cells, either untreated or electroporated with 6 μM of RNP32, were placed in erythroid-inducing conditions for 18 days. The relative abundance of globin chains in erythroid lysate was analyzed by RP-UPLC and HbF levels were calculated as HbF (%)=(Aγ+Gγ)/(Aγ+Gγ +β) (%). FIG. 51B shows the frequency of HbF+ RBCs evaluated by flow cytometry in one independent experiment. For FIG. 51A and FIG. 51B, each dot represents 1 sample. Paired T test was performed to determine whether the differences between RNP32-treated samples and untreated samples were statistically significant. * p<0.05, ** p<0.01, **** p<0.0001. RP-UPLC=reverse phase ultra-performance liquid chromatography. Untreated cells did not undergo electroporation. FIG. 51C shows comparable and robust ex vivo HbF expression in RNP32 edited CD34+ cells from normal donors and patients with SCD. The percentage of HbF is shown by expression levels of gamma-globin chains over total beta-like globin chains (gamma chains/[gamma chains+beta chain]) in unedited and RNP32 edited CD34+ cells from normal donors (n=3) and in unedited and RNP32 edited CD34+ cells from patients with SCD (n=4). Unedited cells did not undergo electroporation.

[0136] FIG. 52 shows RNP32 edited CD34+ derived red blood cells (RBCs) from SCD patients have reduced sickling versus unedited RBCs from SCD patients when exposed to sodium metabisulfite and examined under a microscope. The percentage of sickled RBCs is shown for unedited SCD-derived RBCs and RNP32 edited SCD-derived RBCs. The mean HbF percentage is also shown for unedited SCD-derived RBCs and RNP32 edited SCD-derived RBCs.

[0137] FIG. 53A shows a graphic representation of the measured loss of deformability, the point-of-sickling of SCD RBCs, as a result of oxygen-depletion in time, followed by subsequent gain of deformability of RBC's during reoxygenation, as is visualized on the Oxygenscan. EImax represents RBC deformability at normoxia and EImin represents deformability upon deoxygenation. The point of sickling (PoS) reflects pO2 at which sickling begins and a >5% decrease in EI is observed during deoxygenation. EI=elongation index. FIGS. 53B-53E shows the assessment of RBC deformability. Cultured RBCs from three batches of untreated normal CD34+ cells (FIG. 53B) and four batches of untreated or RNP32-edited SCD CD34+ cells (FIG. 53C) were analyzed on the Lorrca ektacytometer to measure deformability under shear stress, expressed as elongation index, when subjected to decreasing level of O2. In FIG. 53C, RBCs cultured from CD34+ cells that did not undergo electroporation with RNP32 (untreated) are represented by the black line (bottom line in all plots until at least 25 mmHg) and RBCs cultured from RNP32-edited SCD CD34+ cells are repsented by a dark gray line (top line in all plots until at least 25 mmHg). The point of sickling, representing the relative oxygen pressure when the SCD RBCs started to sickle during deoxygenation was plotted for each SCD RBC sample (FIG. 53D). The minimum elongation index of each SCD RBC sample, approximating the flexibility of RBC when deoxygenated is shown in (FIG. 53E). Each line connects the RBCs cultured from untreated and RNP32 edited cells from the same donor in the same experiment. CEL211-001 was tested twice in two independent experiments. A paired T test was performed to determine whether the differences between RBCs cultured from RNP32-treated samples and untreated samples were statistically significant. ** p<0.01, *** p<0.001.

[0138] FIG. 54A shows a rheology assessment of cultured RBCs. Untreated CD34+ cells and untreated or RNP32-electroporated SCD CD34+ cells were placed in erythroid-inducing conditions for 18 days to generate erythroid cells. Rheological behavior of cultured RBCs under varying concentrations of oxygen were evaluated using a microfluidic platform. The percentage velocity drop was calculated based on the differences between velocity at specified oxygen concentration and at atmospheric levels of oxygen (21%). Data shown are mean±standard deviation. N=5: untreated SCD samples, N=5: RNP32 treated SCD samples, N=4: untreated normal samples. Paired T test was used to compare the means between RBCs cultured from untreated and corresponding RNP32-edited SCD samples. *p<0.05, ***p<0.001, ****p<0.0001. FIG. 54B shows a summary of percentage velocity drop by varying oxygen concentration. ^{b} indicates samples clogged during assessment and experiments were aborted. Only data collected prior to the blockage formation are reported. Data are not plotted in FIG. 54A. FIG. 54C shows that RBCs cultured from RNP32-edited CD34+ cells from SCD patients have improved rheological properties, closer to RBCs from normal donors, compared to RBCs cultured from unedited CD34+ cells from SCD patients when placed in microfluidic channels that mimic blood flow in capillaries, in a range of oxygen levels. The percentage of normalized velocity was evaluated for RBCs cultured from unedited normal donor-derived CD34+ cells (diamonds), RBCs cultured from unedited SCD-donor derived CD34+ cells (triangles), and RBCs cultured from RNP32-edited SCD-derived CD34+ cells (circles) at varying percentages of oxygen. Typical oxygen levels observed in the venous circulation are between ˜4% to 6% oxygen. FIG. 54D shows the correlation between HbF induction and rheology behavior. The level of HbF expressed by SCD samples (x-axis) was plotted against the corresponding percentage velocity drop (y-axis) at 0%, 2%, 4% and 6% oxygen concentration. Simple linear regression analysis was performed and the coefficient of determination is shown in each panel. FIG. 54E shows HbF levels correlate with velocity for RBCs cultured from unedited SCD-derived CD34+ cells (triangles) and RBCs from RNP32-edited SCD-derived CD34+ cells (circles) when placed in microfluidic channels mimicking blood flow in capillaries at an oxygen level of 4%. The percentage of HbF is shown by expression levels of gamma-globin chains over total beta-like globin chains (gamma chains/[gamma chains+beta chain]).

[0139] FIG. 55A shows a schematic of the distal CCAAT box region with 0-based hg38 coordinates chr11:5,249,949-5,249,987 (+) in HBG1 and chr11:5,254,873-5,254,911 (+) in HBG2. The black line marks the DNA sequence of the gRNA targeting domain of the gRNA of RNP32 (i.e., CCUUGUCAAGGCUAUUGGUCA (SEQ ID NO:1254)). The black box marks the distal CCAAT box. The dark grey jagged line with arrows marks the expected 4 nucleotide 5′ overhang after cutting with RNP32. The grey dotted line marks the expected cut site of RNP32. The base before the cut site is marked with a black arrow at position −118 bases with respect to the TSS. The distances for the bases at the boundaries to the TSS are marked by black arrows at the end of the sequences (TSS: −93 and −130). FIG. 55B shows the oligonucleotides used for sequencing the indel profiles generated by RNP32. FIG. 55C shows the amplicon used for analysis of RNP32 editing. FIG. 55D shows an example of an indel_id used to characterize the indel profile of RNP32. The Indel_id is a string identifying the indel, shown as indel_start_position+_+indel_length+_+ID. Where ID is NA for deletions and for insertions is the sequence inserted.

[0140] FIG. 56 depicts the percentage of >3 bp NHEJ mediated indels, >3 bp MMEJ mediated indels, and ≤3 bp indels at the distal CCAAT box resulting from editing by RNP32: NHEJ >3 bp=65.9%; ≤3 bp=8.6%; MMEJ >3 bp=25.5%.

[0141] FIG. 57 shows the wild type (wt) allele and top 20 indels, together with their average percentages in indel for all the samples, and their corresponding final sequences after the edit. Dashes represent deleted bases and the vertical line is the cut site (see also FIG. 55A). The black line marks the DNA sequence of the gRNA targeting domain of the gRNA of RNP32 (i.e., CCUUGUCAAGGCUAUUGGUCA (SEQ ID NO:1254)), and shorter black line marks the distal CCAAT box (appearing reverse complemented here). Base distances with respect to TSS are marked by arrows.

[0142] FIG. 58 shows the percentage of detected deletions as a function of the distance between the deletion center and the cut site, represented by the vertical dashed grey line taken as the middle of the 5′ overhang. The highest peak is at position −6 bp relative to the cut site (TSS: −113) zand towards the TSS (see also FIG. 55A). Profiles are shown as black for normal donor samples (Normal, N=4,), light grey for sickle cell donor samples (SCD, N=5) and dark grey for an additional set of normal donor samples (Normal=5, SCD1) samples. The second set of Normal samples are from study SCD1 and were mobilized with G-CSF and plerixafor and generated using the large-scale process. The black line marks the DNA sequence of the gRNA targeting domain of the gRNA of RNP32 (i.e., CCUUGUCAAGGCUAUUGGUCA (SEQ ID NO:1254)), and short black line marks the distal CCAAT box (appearing reverse complemented here).

[0143] FIG. 59 shows the percentage of detected indels as a function of the deletion size (negative values on the x axis) or insertion (positive values in the x axis). The vertical line separates insertions and deletions. The highest peak is the deletion of size 18 corresponding to the indel 159_-18_NA. Profiles are shown as black for normal donor samples (Normal, N=4), light grey for sickle cell donor samples (SCD, N=5) and dark grey for an additional set of normal donor samples (Normal=5, SCD1) samples. The second set of Normal samples are from study SCD1 and were mobilized with G-CSF and plerixafor and generated using the large-scale process.

[0144] FIG. 60 shows the average percentages for indel lengths between 50 and −50. Positive values indicate insertions. Negative values indicate deletions.

[0145] FIG. 61 shows the percentage of bases deleted along the target region in samples edited with RNP32. Profiles are shown as black for normal donor samples (Normal, N=4), light grey for sickle cell donor samples (SCD, N=5) and dark grey for an additional set of normal donor samples (Normal =5, SCD1) samples. The second set of Normal samples are from study SCD1 and were mobilized with G-CSF and plerixafor and generated using the large-scale process. The target region DNA sequence is shown on the x axis. The black line marks the DNA sequence of the gRNA targeting domain of the gRNA of RNP32 (i.e., CCUUGUCAAGGCUAUUGGUCA (SEQ ID NO:1254)), and short black line marks the distal CCAAT box (appearing reverse complemented here). Vertical dashed grey line represents the cut site, taken as the middle of the 5′ overhang (see also FIG. 55A).

[0146] FIG. 62 shows the normalized profiles (each with a maximum value of 1) for the detected deletions at each base on the target region in samples edited with RNP32. Profiles are shown as black for normal donor samples (Normal, N=4), light grey for sickle cell donor samples (SC The second set of Normal samples are from study SCD1 and were mobilized with G-CSF and plerixafor and generated using the large-scale process. The target region sequence is shown in the x axis. The black line marks the DNA sequence of the gRNA targeting domain of the gRNA of RNP32 (i.e., CCUUGUCAAGGCUAUUGGUCA (SEQ ID NO:1254)), and short black line marks the distal CCAAT box (appearing reverse complemented here). Vertical dashed grey line represents the cut site, taken as the middle of the 5′ overhang (see also FIG. 55A).

[0147] FIG. 63 shows the number of indels detected across multiple samples. Shown are the counts for the number of indels as a function of the number of samples in which the indel was detected.

[0148] FIG. 64 shows the indel reproducibility across all 14 samples as a function of their average percentage in indels. Shown are the average percentages in indel (y-axis) grouped by the number of samples in which the indel was detected (x-axis). Grey horizontal line at 0.22% marks the lowest percentage in indel of the top 55 indels.

[0149] FIGS. 65A and 65B show on-target indel levels of CD34+ cells based on RNP32 concentration at electroporation. Total on-target editing indel level was determined via Illumina sequencing at day 1 (FIG. 65A) and day 2 (FIG. 65B) after CD34+ cells were electroporated with RNP32 at the concentrations indicated. Data were compiled from eight independent experiments. A total of five RNP batches and four lots of normal donor CD34+ cells were tested across eleven concentrations of RNP32 ranging from 0.125 μM to 8 μM. Each dot represents an individual electroporation. Indel=insertions and/or deletions.

[0150] FIG. 66 shows a summary of cell viability at day 1 electroporation with RNP32. Data marked with an * indicates RNP32 found to be poorly complexed based on differential scanning fluorimetry and thus data were excluded.

[0151] FIG. 67 shows a summary of on-target indel levels at day 1 post-electroporation with RNP32. Data marked with an * indicates RNP32 found to be poorly complexed based on differential scanning fluorimetry and thus data were excluded.

[0152] FIG. 68 shows a summary of on-target indels at day 2 post-electroporation. Data marked with an * indicates RNP32 found to be poorly complexed based on differential scanning fluorimetry and thus data were excluded.

[0153] FIGS. 69A and 69B shows the frequency of 4.9 kb fragment deletion in edited CD34+ cells at day 1 and day 2 post-electroporation. Frequency of 4.9 kb fragment deletion between two RNP32 cut sites in CD34+ cells was assessed by ddPCR assays at Day 1 and Day 2 post electroporation with RNP at the concentration indicated (FIG. 69A). The 4.9 kb deletion to indel ratio was calculated by dividing levels of deletion with levels of indels for each sample (FIG. 69B). Data were compiled from three independent experiments. A total of two RNP batches and two lots of normal donor CD34+ cells were tested across eight concentrations of RNP32 ranging from 0.125 μM to 8 μM. Each dot represents an individual electroporation. Indel=insertions and/or deletions.

[0154] FIG. 70 shows the summary of 4.9 kb fragment deletion frequency at day 1 and day 2 post-electroporation with RNP32.

[0155] FIGS. 71A and 71B show on-target indel levels of subpopulations of hematopoietic stem and progenitor cells. CD34+ cells were sorted 2 days post-electroporation into subpopulations of CMP, MPP, and LT-HSC based on surface immunophenotype. FIG. 71A shows on-target indel levels determined via Illumina sequencing. The ratio of on-target indel levels within the phenotypic LT-HSC population to the total CD34+ cells is depicted in FIG. 71B. A ratio of 1 (dotted line) illustrates that the LT-HSCs have the same on-target indel levels as total CD34+ cells. CMP=common myeloid progenitors; Indel=insertions and/or deletions; LT-HSC=long-term hematopoietic stem cells; MPP=multipotent progenitors.

[0156] FIG. 72 shows a summary of on-target indel levels in total CD34+ cells and sorted subpopulations at day 2 post-electroporation. CMP=common myeloid progenitors; Indel=insertions and/or deletions; LT-HSC=long-term hematopoietic stem cells; MPP=multipotent progenitors.

[0157] FIGS. 73A and 73B show the frequency of 4.9 kb fragment deletion in total CD34+ cells and sorted hematopoietic stem and progenitor cell subpopulations. CD34+ cells were sorted 2 days post electroporation into subpopulations of CMP, MPP, and LT HSC based on surface immunophenotype. FIG. 73A shows the frequency of 4.9 kb deletion determined via ddPCR. The 4.9 kb deletion to indel ratio was calculated by dividing levels of deletion with levels of indels for each sample (FIG. 73B). A lower ratio depicts a lower propensity of 4.9 kb deletions to occur within a population. Multiple comparison was performed using Friedman test. *p=0.01, ****p<0.0001. CMP=common myeloid progenitors; Indel=insertions and/or deletions; LT HSC=long-term hematopoietic stem cells; MPP=multipotent progenitors.

[0158] FIG. 74 shows a summary of 4.9 kb fragment deletion frequency in total CD34+ cells and sorted subpopulations at day 2 post-electroporation with RNP32. CD34+=cluster of differentiation 34; CMP=common myeloid progenitors; Indel=insertions and/or deletions; LT-HSC=long-term hematopoietic stem cells; MPP=multipotent progenitors; RNP=ribonucleoprotein.

### DETAILED DESCRIPTION

### Definitions and Abbreviations

[0159] Unless otherwise specified, each of the following terms has the meaning associated with it in this section.

[0160] The indefinite articles “a” and “an” refer to at least one of the associated noun, and are used interchangeably with the terms “at least one” and “one or more.” For example, “a module” means at least one module, or one or more modules.

[0161] The conjunctions “or” and “and/or” are used interchangeably as non-exclusive disjunctions.

[0162] “Domain” is used to describe a segment of a protein or nucleic acid. Unless otherwise indicated, a domain is not required to have any specific functional property.

[0163] The term “exogenous trans-acting factor” refers to any peptide or nucleotide component of a genome editing system that both (a) interacts with an RNA-guided nuclease or gRNA by means of a modification, such as a peptide or nucleotide insertion or fusion, to the RNA-guided nuclease or gRNA, and (b) interacts with a target DNA to alter a helical structure thereof. Peptide or nucleotide insertions or fusions may include, without limitation, direct covalent linkages between the RNA-guided nuclease or gRNA and the exogenous trans-acting factor, and/or non-covalent linkages mediated by the insertion or fusion of RNA/protein interaction domains such as MS2 loops and protein/protein interaction domains such as a PDZ, Lim or SH1, 2 or 3 domains. Other specific RNA and amino acid interaction motifs will be familiar to those of skill in the art. Trans-acting factors may include, generally, transcriptional activators.

[0164] The term “booster element” refers to an element which, when co-delivered with a ribonucleoprotein (RNP) complex comprising a gRNA complexed to an RNA-guided nuclease (“gRNA-nuclease-RNP”), increases editing of a target nucleic acid compared with editing of the target nucleic acid without the booster element. In certain embodiments, co-delivery may be sequential or simultaneous. In certain embodiments, a booster element may be an RNP complex comprised of a dead guide RNA complexed with a WT Cas9 protein, a Cas9 nickase protein (e.g., Cas9 D10A protein), or an enzymatically inactive Cas9 (eiCas9) protein. In certain embodiments, a booster element may be an RNP complex comprised of a guide RNA complexed with a Cas9 nickase protein (e.g., Cas9 D10A protein) or an enzymatically inactive Cas9 (eiCas9) protein. In certain embodiments, a booster element may be a single- or double stranded donor template DNA. In certain embodiments, one or more booster elements may be codelivered with a gRNA-nuclease-RNP to increase editing of a target nucleic acid. In certain embodiments, a booster element may be co-delivered with an RNP comprising a gRNA complexed to a Cpf1 molecule (“gRNA-Cpf1-RNP”) to increase editing of a target nucleic acid.

[0165] “Productive indel” refers to an indel (deletion and/or insertion) that results in HbF expression. In certain embodiments, a productive indel may induce HbF expression. In certain embodiments, a productive indel may result in an increased level of HbF expression.

[0166] An “indel” is an insertion and/or deletion in a nucleic acid sequence. An indel may be the product of the repair of a DNA double strand break, such as a double strand break formed by a genome editing system of the present disclosure. An indel is most commonly formed when a break is repaired by an “error prone” repair pathway such as the NHEJ pathway described below.

[0167] “Gene conversion” refers to the alteration of a DNA sequence by incorporation of an endogenous homologous sequence (e.g. a homologous sequence within a gene array). “Gene correction” refers to the alteration of a DNA sequence by incorporation of an exogenous homologous sequence, such as an exogenous single- or double stranded donor template DNA. Gene conversion and gene correction are products of the repair of DNA double-strand breaks by HDR pathways such as those described below.

[0168] Indels, gene conversion, gene correction, and other genome editing outcomes are typically assessed by sequencing (most commonly by “next-gen” or “sequencing-by-synthesis” methods, though Sanger sequencing may still be used) and are quantified by the relative frequency of numerical changes (e.g., ±1, ±2 or more bases) at a site of interest among all sequencing reads. DNA samples for sequencing may be prepared by a variety of methods known in the art, and may involve the amplification of sites of interest by polymerase chain reaction (PCR), the capture of DNA ends generated by double strand breaks, as in the GUIDEseq process described in Tsai 2016 (incorporated by reference herein) or by other means well known in the art. Genome editing outcomes may also be assessed by in situ hybridization methods such as the FiberComb™ system commercialized by Genomic Vision (Bagneux, France), and by any other suitable methods known in the art.

[0169] “Alt-HDR,” “alternative homology-directed repair,” or “alternative HDR” are used interchangeably to refer to the process of repairing DNA damage using a homologous nucleic acid (e.g., an endogenous homologous sequence, e.g., a sister chromatid, or an exogenous nucleic acid, e.g., a template nucleic acid). Alt-HDR is distinct from canonical HDR in that the process utilizes different pathways from canonical HDR, and can be inhibited by the canonical HDR mediators, RAD51 and BRCA2. Alt-HDR is also distinguished by the involvement of a single-stranded or nicked homologous nucleic acid template, whereas canonical HDR generally involves a double-stranded homologous template.

[0170] “Canonical HDR,” “canonical homology-directed repair” or “cHDR” refer to the process of repairing DNA damage using a homologous nucleic acid (e.g., an endogenous homologous sequence, e.g., a sister chromatid, or an exogenous nucleic acid, e.g., a template nucleic acid). Canonical HDR typically acts when there has been significant resection at the double strand break, forming at least one single stranded portion of DNA. In a normal cell, cHDR typically involves a series of steps such as recognition of the break, stabilization of the break, resection, stabilization of single stranded DNA, formation of a DNA crossover intermediate, resolution of the crossover intermediate, and ligation. The process requires RAD51 and BRCA2, and the homologous nucleic acid is typically double-stranded.

[0171] Unless indicated otherwise, the term “HDR” as used herein encompasses both canonical HDR and alt-HDR.

[0172] “Non-homologous end joining” or “NHEJ” refers to ligation mediated repair and/or non-template mediated repair including canonical NHEJ (cNHEJ) and alternative NHEJ (altNHEJ), which in turn includes microhomology-mediated end joining (MMEJ), single-strand annealing (SSA), and synthesis-dependent microhomology-mediated end joining (SD-MMEJ).

[0173] “Replacement” or “replaced,” when used with reference to a modification of a molecule (e.g. a nucleic acid or protein), does not require a process limitation but merely indicates that the replacement entity is present.

[0174] “Subject” means a human, mouse, or non-human primate. A human subject can be any age (e.g., an infant, child, young adult, or adult), and may suffer from a disease, or may be in need of alteration of a gene.

[0175] “Treat,” “treating,” and “treatment” mean the treatment of a disease in a subject (e.g., a human subject), including one or more of inhibiting the disease, i.e., arresting or preventing its development or progression; relieving the disease, i.e., causing regression of the disease state; relieving one or more symptoms of the disease; and curing the disease.

[0176] “Prevent,” “preventing,” and “prevention” refer to the prevention of a disease in a subject, including (a) avoiding or precluding the disease; (b) affecting the predisposition toward the disease; or (c) preventing or delaying the onset of at least one symptom of the disease.

[0177] A “kit” refers to any collection of two or more components that together constitute a functional unit that can be employed for a specific purpose. By way of illustration (and not limitation), one kit according to this disclosure can include a guide RNA complexed or able to complex with an RNA-guided nuclease, and accompanied by (e.g. suspended in, or suspendable in) a pharmaceutically acceptable carrier. In certain embodiments, the kit may include a booster element. The kit can be used to introduce the complex into, for example, a cell or a subject, for the purpose of causing a desired genomic alteration in such cell or subject. The components of a kit can be packaged together, or they may be separately packaged. Kits according to this disclosure also optionally include directions for use (DFU) that describe the use of the kit e.g., according to a method of this disclosure. The DFU can be physically packaged with the kit, or it can be made available to a user of the kit, for instance by electronic means.

[0178] The terms “polynucleotide”, “nucleotide sequence”, “nucleic acid”, “nucleic acid molecule”, “nucleic acid sequence”, and “oligonucleotide” refer to a series of nucleotide bases (also called “nucleotides”) in DNA and RNA, and mean any chain of two or more nucleotides. The polynucleotides, nucleotide sequences, nucleic acids etc. can be chimeric mixtures or derivatives or modified versions thereof, single-stranded or double-stranded. They can be modified at the base moiety, sugar moiety, or phosphate backbone, for example, to improve stability of the molecule, its hybridization parameters, etc. A nucleotide sequence typically carries genetic information, including, but not limited to, the information used by cellular machinery to make proteins and enzymes. These terms include double- or single-stranded genomic DNA, RNA, any synthetic and genetically manipulated polynucleotide, and both sense and antisense polynucleotides. These terms also include nucleic acids containing modified bases.

[0179] Conventional IUPAC notation is used in nucleotide sequences presented herein, as shown in Table 1, below (see also Cornish-Bowden A, Nucleic Acids Res. 1985 May 10; 13(9):3021-30, incorporated by reference herein). It should be noted, however, that “T” denotes “Thymine or Uracil” in those instances where a sequence may be encoded by either DNA or RNA, for example in gRNA targeting domains.

TABLE 1
IUPAC nucleic acid notation

| Character | Base |
|---|---|
| A | Adenine |
| T | Thymine or Uracil |
| G | Guanine |
| C | Cytosine |
| U | Uracil |
| K | G or T/U |
| M | A or C |
| R | A or G |
| Y | C or T/U |
| S | C or G |
| W | A or T/U |
| B | C, G or T/U |
| V | A, C or G |
| H | A, C or T/U |
| D | A, G or T/U |
| N | A, C, G or T/U |

[0180] The terms “protein,” “peptide” and “polypeptide” are used interchangeably to refer to a sequential chain of amino acids linked together via peptide bonds. The terms include individual proteins, groups or complexes of proteins that associate together, as well as fragments or portions, variants, derivatives and analogs of such proteins. Peptide sequences are presented herein using conventional notation, beginning with the amino or N-terminus on the left, and proceeding to the carboxyl or C-terminus on the right. Standard one-letter or three-letter abbreviations can be used.

[0181] The notation “CCAAT box target region” and the like refer to a sequence that is 5′ of the transcription start site (TSS) of the HBG1 and/or HBG2 gene. CCAAT boxes are highly conserved motifs within the promoter region of α-like and β-like globin genes. The regions within or near the CCAAT box play important roles in globin gene regulation. For example, the γ-globin distal CCAAT box is associated with hereditary persistence of fetal hemoglobin. A number of transcription factors have been reported to bind to the duplicated CCAAT box region of the γ-globin promoter, e.g., NF-Y, COUP-TFII (NF-E3), CDP, GATA1/NF-E1 and DRED (Martyn 2017). While not wishing to be bound by theory, it is believed that the binding sites of the transcriptional activator NF-Y overlaps with transcriptional repressors at the γ-globin promoter. HPFH mutations present within the distal γ-globin promoter region, e.g., within or near the CCAAT box, may alter the competitive binding of those factors and thus contribute to the increased γ-globin expression and elevated levels of HbF. Genomic locations provided herein for HBG1 and HBG2 are based on the coordinates provided in NCBI Reference Sequence NC_000011, “Homo sapiens chromosome 11, GRCh38.p12 Primary Assembly,” (Version NC_000011.10). The distal CCAAT box of HBG1 and HBG2 is positioned at HBG1 and HBG2 c.−111 to −115 (Genomic location is Hg38 Chr11:5,249,968 to Chr11:5,249,972 and Hg38 Chr11:5,254,892 to Chr11:5,254,896, respectively). The HBG1 c.−111 to −115 region is exemplified in SEQ ID NO:902 (HBG1) at positions 2823-2827, and the HBG2 c.−111 to −115 region is exemplified in SEQ ID NO:903 (HBG2) at positions 2747-2751. In certain embodiments, the “CCAAT box target region” denotes the region that is at or near the distal CCAAT box and includes the nucleotides of the distal CCAAT box and 25 nucleotides upstream (5′) and 25 nucleotides downstream (3′) of the distal CCAAT box (i.e., HBG1 /2 c.−86 to −140) (Genomic location is Hg38 Chr11:5249943 to Hg38 Chr11:5249997 and Hg38 Chr11:5254867 to Hg38 Chr11:5254921, respectively). The HBG1 c.−86 to −140 region is exemplified in SEQ ID NO:902 (HBG1) at positions 2798-2852, and the HBG2 c.−86 to −140 region is exemplified in SEQ ID NO:903 (HBG2) at positions 2723-2776. In other embodiments, the “CCAAT box target region” denotes the region that is at or near the distal CCAAT box and includes the nucleotides of the distal CCAAT box and 5 nucleotides upstream (5′) and 5 nucleotides downstream (3′) of the distal CCAAT box (i.e., HBG1/2 c.−106 to −120 (Genomic location is Hg38 Chr11:5249963 to Hg38 Chr11:5249977 (HGB1 and Hg38 Chr11:5254887 to Hg38 Chr11:5254901, respectively)). The HBG1 c.−106 to −120 region is exemplified in SEQ ID NO:902 (HBG1) at positions 2818-2832, and the HBG2 c.−106 to −120 region is exemplified in SEQ ID NO:903 (HBG2) at positions 2742-2756. The term “CCAAT box target site alteration” and the like refer to alterations (e.g., deletions, insertions, mutations) of one or more nucleotides of the CCAAT box target region. Examples of exemplary CCAAT box target region alterations include, without limitation, the 1 nt deletion, 4 nt deletion, 11 nt deletion, 13 nt deletion, and 18 nt deletion, and −117 G>A alteration. As used herein, the terms “CCAAT box” and “CAAT box” can be used interchangeably.

[0182] The notations “c.−114 to −102 region,” “c.−102 to −114 region,” “−102:−114,” “13 nt target region” and the like refer to a sequence that is 5′ of the transcription start site (TSS) of the HBG1 and/or HBG2 gene at the genomic location Hg38 Chr11:5,249,959 to Hg38 Chr11:5,249,971 and Hg38 Chr11:5,254,883 to Hg38 Chr11:5,254,895, respectively. The HBG1 c.−102 to −114 region is exemplified in SEQ ID NO:902 (HBG1) at positions 2824-2836 and the HBG2 c.−102 to −114 region is exemplified in SEQ ID NO:903 (HBG2) at positions 2748-2760. The term “13 nt deletion” and the like refer to deletions of the 13 nt target region.

[0183] The notations “c.−121 to −104 region,” “c.−104 to −121 region,” “−104:−121,” “18 nt target region,” and the like refer to a sequence that is 5′ of the transcription start site (TSS) of the HBG1 and/or HBG2 gene at the genomic location Hg38 Chr11:5,249,961 to Hg38 Chr11:5,249,978 and Hg38 Chr11:5,254,885 to Hg38 Chr1l: 5,254,902, respectively. The HBG1 c.−104 to −121 region is exemplified in SEQ ID NO:902 (HBG1) at positions 2817-2834, and the HBG2 c.−104 to −121 region is exemplified in SEQ ID NO:903 (HBG2) at positions 2741-2758. The term “18 nt deletion” and the like refer to deletions of the 18 nt target region.

[0184] The notations “c.−105 to −115 region,” “c.−115 to −105 region,” “−105:−115,” “11 nt target region,” and the like refer to a sequence that is 5′ of the transcription start site (TSS) of the HBG1 and/or HBG2 gene at the genomic location Hg38 Chr11:5,249,962 to Hg38 Chr11:5,249,972 and Hg38 Chr11:5,254,886 to Hg38 Chr11:5,254,896, respectively. The HBG1 c.−105 to −115 region is exemplified in SEQ ID NO:902 (HBG1) at positions 2823-2833, and the HBG2 c.−105 to −115 region is exemplified in SEQ ID NO:903 (HBG2) at positions 2747-2757. The term “11 nt deletion” and the like refer to deletions of the 11 nt target region.

[0185] The notations “c.−115 to −112 region,” “c.−112 to −115 region,” “−112:−115,” “4 nt target region,” and the like refer to a sequence that is 5′ of the transcription start site (TSS) of the HBG1 and/or HBG2 gene at the genomic location Hg38 Chr11:5,249,969 to Hg38 Chr11:5,249,972 and Hg38 Chr11:5,254,893 to Hg38 Chr11:5,254,896, respectively. The HBG1 c.−112 to −115 region is exemplified in SEQ ID NO:902 at positions 2823-2826, and the HBG2 c.−112 to −115 region is exemplified in SEQ ID NO:903 (HBG2) at positions 2747-2750. The term “4 nt deletion” and the like refer to deletions of the 4 nt target region.

[0186] The notations “c.−116 region,” “HBG-116,” “1 nt target region,” and the like refer to a sequence that is 5′ of the transcription start site (TSS) of the HBG1 and/or HBG2 gene at the genomic location Hg38 Chr11:5,249,973 and Hg38 Chr11:5,254,897, respectively. The HBG1 c.−116 region is exemplified in SEQ ID NO:902 at position 2822, and the HBG2 c.−116 region is exemplified in SEQ ID NO:903 (HBG2) at position 2746. The term “1 nt deletion” and the like refer to deletions of the 1 nt target region.

[0187] The notations “c.−117 G>A region,” “HBG-117 G>A,” “−117 G>A target region” and the like refer to a sequence that is 5′ of the transcription start site (TSS) of the HBG1 and/or HBG2 gene at the genomic location Hg38 Chr11:5,249,974 to Hg38 Chr11:5,249,974 and Hg38 Chr11:5,254,898 to Hg38 Chr11:5,254,898, respectively. The HBG1 c.−117 G>A region is exemplified by a substitution from guanine (G) to adenine (A) in SEQ ID NO:902 at position 2821, and the HBG2 c.−117 G>A region is exemplified by a substitution from G to A in SEQ ID NO:903 (HBG2) at position 2745. The term “−117 G>A alteration” and the like refer to a substitution from G to A at the −117G>A target region.

[0188] The term “proximal HBG1/2 promoter target sequence” denotes the region within 50, 100, 200, 300, 400, or 500 bp of a proximal HBG1/2 promoter sequence including the 13 nt target region. Alterations by genome editing systems according to this disclosure facilitate (e.g. cause, promote or tend to increase the likelihood of) upregulation of HbF production in erythroid progeny.

[0189] The term “GATA1 binding motif in BCL11Ae” refers to the sequence that is the GATA1 binding motif in the erythroid specific enhancer of BCL11A (BCL11Ae) that is in the +58 DNase I hypersensitive site (DHS) region of intron 2 of the BCL11A gene. The genomic coordinates for the GATA1 binding motif in BCL11Ae are chr2: 60,495,265 to 60,495,270. The +58 DHS site comprises a 115 base pair (bp) sequence as set forth in SEQ ID NO:968. The +58 DHS site sequence, including −500 bp upstream and −200 bp downstream is set forth in SEQ ID NO:969.

[0190] Where ranges are provided herein, endpoints are included. Furthermore, it is to be understood that unless otherwise indicated or otherwise evident from the context and/or the understanding of one of ordinary skill in the art, values that are expressed as ranges can assume any specific value within the stated ranges in different embodiments of the invention, to the tenth of the unit of the lower limit of the range, unless the context clearly dictates otherwise. It is also to be understood that unless otherwise indicated or otherwise evident from the context and/or the understanding of one of ordinary skill in the art, values expressed as ranges can assume any subrange within the given range, wherein the endpoints of the subrange are expressed to the same degree of accuracy as the tenth of the unit of the lower limit of the range.

### Overview

[0191] The various embodiments of this disclosure generally relate to genome editing systems configured to introduce alterations (e.g., a deletion or insertion, or other mutation) into chromosomal DNA that enhance transcription of the HBG1 and/or HBG2 genes, which encode the Aγ and Gγ subunits of hemoglobin, respectively. In certain embodiments, increased expression of one or more γ-globin genes (e.g., HBG1, HBG2) using the methods provided herein results in preferential formation of HbF over HbA and/or increased HbF levels as a percentage of total hemoglobin. In certain embodiments, the disclosure generally relates to the use of RNP complexes comprising a gRNA complexed to a Cpf1 molecule. In certain embodiments, the gRNA may be unmodified or modified, the Cpf1 molecule may be a wild-type Cpf1 protein or a modified Cpf1 protein. In certain embodiments, the gRNA may comprise a sequence set forth in Table 6, Table 12, or Table 13. In certain embodiments, a modified Cpf1 may be encoded by a sequence set forth in SEQ ID NOs:1000, 1001, 1008-1018, 1032, 1035-39, 1094-1097, 1107-09 (Cpf1 polypeptide sequences) or SEQ ID NOs:1019-1021, 1110-17 (Cpf1 polynucleotide sequences). In certain embodiments, the RNP complex may comprise an RNP complex set forth in Table 15. For example, the RNP complex may include a gRNA comprising the sequence set forth in SEQ ID NO:1051 and a modified Cpf1 protein encoded by the sequence set forth in SEQ ID NO:1097 (RNP32, Table 15).

[0192] It has previously been shown that patients with the condition Hereditary Persistence of Fetal Hemoglobin (HPFH) contain mutations in an γ-globin regulatory element that results in fetal γ-globin expression throughout life, rather than being repressed around the time of birth (Martyn 2017). This results in elevated fetal hemoglobin (HbF) expression. HPFH mutations may be deletional or non-deletional (e.g., point mutations). Subjects with HPFH exhibit lifelong expression of HbF, i.e., they do not undergo or undergo only partial globin switching, with no symptoms of anemia.

[0193] HbF expression can be induced through point mutations in an γ-globin regulatory element that is associated with a naturally occurring HPFH variant, including, for example, HBG1 c.−114 C>T; c.−117 G>A; c.−158 C>T; c.−167 C>T; c.−170 G>A; c.−175 T>G; c.−175 T>C; c.−195 C>G; c.−196 C>T; c.−197 C>T; c.−198 T>C; c.−201 C>T; c.−202 C>T; c.−211 C>T, c.−251 T>C; or c.−499 T>A; or HBG2 c.−109 G>T; c.−110 A>C; c.−114 C>A; c.−114 C>T; c.−114 C>G; c.−157 C>T; c.−158 C>T; c.−167 C>T; c.−167 C>A; c.−175 T>C; c.−197 C>T; c.−200+C; c.−202 C>G; c.−211 C>T; c.−228 T>C; c.−255 C>G; c.−309 A>G; c.−369 C>G; or c.−567 T>G.

[0194] Naturally occurring mutations at the distal CCAAT box motif found within the promoter of the HBG1 and/or HBG2 genes (i.e., HBG1/2 c.−111 to −115) have also been shown to result in continued γ-globin expression and the HPFH condition. It is thought that alteration (mutation or deletion) of the CCAAT box may disrupt the binding of one or more transcriptional repressors, resulting in continued expression of the γ-globin gene and elevated HbF expression (Martyn 2017). For example, a naturally occurring 13 base pair del c.−114 to −102 (“13 nt deletion”) has been shown to be associated with elevated levels of HbF (Martyn 2017). The distal CCAAT box likely overlaps with the binding motifs within and surrounding the CCAAT box of negative regulatory transcription factors that are expressed in adulthood and repress HBG (Martyn 2017).

[0195] A gene editing strategy disclosed herein is to increase HbF expression by disrupting one or more nucleotides in the distal CCAAT box and/or surrounding the distal CCAAT box. In certain embodiments, the “CCAAT box target region” may be the region that is at or near the distal CCAAT box and includes the nucleotides of the distal CCAAT box and 25 nucleotides upstream (5′) and 25 nucleotides downstream (3′) of the distal CCAAT box (i.e., HBG1 /2 c.−86 to −140). In other embodiments, the “CCAAT box target region” may be the region that is at or near the distal CCAAT box and includes the nucleotides of the distal CCAAT box and 5 nucleotides upstream (5′) and 5 nucleotides downstream (3′) of the distal CCAAT box (i.e., HBG1/2 c.−106 to −120). Unique, non-naturally occurring alterations of the CCAAT box target region are disclosed herein that induce HBG expression including, without limitation, HBG del c. −104 to −121 (“18 nt deletion”), HBG del c.−105 to −115 (“11 nt deletion”), HBG del c.−112 to −115 (“4 nt deletion”), and HBG del c.−116 (“1 nt deletion”). In certain embodiments, genome editing systems disclosed herein may be used to introduce alterations into the CCAAT box target region of HBG1 and/or HBG2. In certain embodiments, the genome editing systems may include one or more of a DNA donor template that encodes an alteration (such as a deletion, insertion, or mutation) in the CCAAT box target region. In certain embodiments, the alterations may be non-naturally occurring alterations or naturally occurring alterations. In certain embodiments, the donor templates may encode the 1 nt deletion, 4 nt deletion, 11 nt deletion, 13 nt deletion, 18 nt deletion, or c.−117 G>A alteration. In certain embodiments, the genome editing systems may include an RNA guided nuclease including a Cas9, modified Cas 9, a Cpf1, or modified Cpf1. In certain embodiments, the genome editing systems may include an RNP comprising a gRNA and a Cpf1 molecule. In certain embodiments, a gRNA may be unmodified or modified, the Cpf1 molecule may be a wild-type Cpf1 protein or a modified Cpf1 protein, or a combination thereof. In certain embodiments, the gRNA may comprise a sequence set forth in Table 6, Table 12, or Table 13. In certain embodiments, a modified Cpf1 may be encoded by a sequence set forth in SEQ ID NOs:1000, 1001, 1008-1018, 1032, 1035-39, 1094-1097, 1107-09 (Cpf1 polypeptide sequences) or SEQ ID NOs:1019-1021, 1110-17 (Cpf1 polynucleotide sequences). In certain embodiments, the RNP complex may comprise an RNP complex set forth in Table 15. For example, the RNP complex may include a gRNA comprising the sequence set forth in SEQ ID NO:1051 and a modified Cpf1 protein encoded by the sequence set forth in SEQ ID NO: 1097 (RNP32, Table 15).

[0196] The genome editing systems of this disclosure can include an RNA-guided nuclease such as Cpf1 and one or more gRNAs having a targeting domain that is complementary to a sequence in or near the target region, and optionally one or more of a DNA donor template that encodes a specific mutation (such as a deletion or insertion) in or near the target region, and/or an agent that enhances the efficiency with which such mutations are generated including, without limitation, a random oligonucleotide, a small molecule agonist or antagonist of a gene product involved in DNA repair or a DNA damage response, or a peptide agent.

[0197] A variety of approaches to the introduction of mutations into the CCAAT box target region, 13 nt target region, and/or proximal HBG1/2 promoter target sequence may be employed in the embodiments of the present disclosure. In one approach, a single alteration, such as a double-strand break, is made within the CCAAT box target region, 13 nt target region, and/or proximal HBG1/2 promoter target sequence, and is repaired in a way that disrupts the function of the region, for example by the formation of an indel or by the incorporation of a donor template sequence that encodes the deletion of the region. In a second approach, two or more alterations are made on either side of the region, resulting in the deletion of the intervening sequence, including the CCAAT box target region and/or 13 nt target region.

[0198] The treatment of hemoglobinopathies by gene therapy and/or genome editing is complicated by the fact that the cells that are phenotypically affected by the disease, erythrocytes or RBCs, are enucleated, and do not contain genetic material encoding either the aberrant hemoglobin protein (Hb) subunits nor the Aγ or Gγ subunits targeted in the exemplary genome editing approaches described above. This complication is addressed, in certain embodiments of this disclosure, by the alteration of cells that are competent to differentiate into, or otherwise give rise to, erythrocytes. Cells within the erythroid lineage that are altered according to various embodiments of this disclosure include, without limitation, hematopoietic stem and progenitor cells (HSCs), erythroblasts (including basophilic, polychromatic and/or orthochromatic erythroblasts), proerythroblasts, polychromatic erythrocytes or reticulocytes, embryonic stem (ES) cells, and/or induced pluripotent stem (iPSC) cells. These cells may be altered in situ (e.g. within a tissue of a subject) or ex vivo. Implementations of genome editing systems for in situ and ex vivo alteration of cells is described under the heading “Implementation of genome editing systems: delivery, formulations, and routes of administration” below.

[0199] In certain embodiments, alterations that result in induction of Aγ and/or Gγ expression are obtained through the use of a genome editing system comprising an RNA-guided nuclease and at least one gRNA having a targeting domain complementary to a sequence within the CCAAT box target region of HBG1 and/or HBG2 or proximate thereto (e.g., within 10, 20, 30, 40, or 50, 100, 200, 300, 400 or 500 bases of the CCAAT box target region). As is discussed in greater detail below, the RNA-guided nuclease and gRNA form a complex that is capable of associating with and altering the CCAAT box target region or a region proximate thereto. Examples of suitable gRNAs and gRNA targeting domains directed to the CCAAT box target region of HBG1 and/or HBG2 or proximate thereto for use in the embodiments disclosed herein include those set forth herein.

[0200] In certain embodiments, alterations that result in induction of Aγ and/or Gγ expression are obtained through the use of a genome editing system comprising an RNA-guided nuclease and at least one gRNA having a targeting domain complementary to a sequence within the 13 nt target region of HBG1 and/or HBG2 or proximate thereto (e.g., within 10, 20, 30, 40, or 50, 100, 200, 300, 400 or 500 bases of the 13 nt target region). As is discussed in greater detail below, the RNA-guided nuclease and gRNA form a complex that is capable of associating with and altering the 13 nt target region or a region proximate thereto. Examples of suitable gRNAs and gRNA targeting domains directed to the 13 nt target region of HBG1 and/or HBG2 or proximate thereto for use in the embodiments disclosed herein include those set forth herein.

[0201] The genome editing system can be implemented in a variety of ways, as is discussed below in detail. As an example, a genome editing system of this disclosure can be implemented as a ribonucleoprotein complex or a plurality of complexes in which multiple gRNAs are used. This ribonucleoprotein complex can be introduced into a target cell using art-known methods, including electroporation, as described in commonly-assigned International Patent Publication No. WO 2016/182959 by Jennifer Gori (“Gori”), published Nov. 17, 2016, which is incorporated by reference in its entirety herein.

[0202] The ribonucleoprotein complexes within these compositions are introduced into target cells by art-known methods, including without limitation electroporation (e.g. using the Nucleofection™ technology commercialized by Lonza, Basel, Switzerland or similar technologies commercialized by, for example, Maxcyte Inc. Gaithersburg, Maryland) and lipofection (e.g. using Lipofectamine™ reagent commercialized by Thermo Fisher Scientific, Waltham Massachusetts). Alternatively, or additionally, ribonucleoprotein complexes are formed within the target cells themselves following introduction of nucleic acids encoding the RNA-guided nuclease and/or gRNA. These and other delivery modalities are described in general terms below and in Gori.

[0203] Cells that have been altered ex vivo according to this disclosure can be manipulated (e.g. expanded, passaged, frozen, differentiated, de-differentiated, transduced with a transgene, etc.) prior to their delivery to a subject. The cells are, variously, delivered to a subject from which they are obtained (in an “autologous” transplant), or to a recipient who is immunologically distinct from a donor of the cells (in an “allogeneic” transplant).

[0204] In some cases, an autologous transplant includes the steps of obtaining, from the subject, a plurality of cells, either circulating in peripheral blood, or within the marrow or other tissue (e.g. spleen, skin, etc.), and manipulating those cells to enrich for cells in the erythroid lineage (e.g. by induction to generate iPSCs, purification of cells expressing certain cell surface markers such as CD34, CD90, CD49f and/or not expressing surface markers characteristic of non-erythroid lineages such as CD10, CD14, CD38, etc.). The cells are, optionally or additionally, expanded, transduced with a transgene, exposed to a cytokine or other peptide or small molecule agent, and/or frozen/thawed prior to transduction with a genome editing system targeting the CCAAT box target region, the 13 nt target region, and/or proximal HBG1/2 promoter target sequence. The genome editing system can be implemented or delivered to the cells in any suitable format, including as a ribonucleoprotein complex, as separated protein and nucleic acid components, and/or as nucleic acids encoding the components of the genome editing system.

[0205] In certain embodiments, CD34+ hematopoietic stem and progenitor cells (HSPCs) that have been edited using the genome editing methods disclosed herein may be used for the treatment of a hemoglobinopathy in a subject in need thereof. In certain embodiments, the hemoglobinopathy may be severe sickle cell disease (SCD) or thalassemia, such as β-thalassemia, δ-thalassemia, or β/δ-thalassemia. In certain embodiments, an exemplary protocol for treatment of a hemoglobinopathy may include harvesting CD34+ HSPCs from a subject in need thereof, ex vivo editing of the autologous CD34+ HSPCs using the genome editing methods disclosed herein, followed by reinfusion of the edited autologous CD34+ HSPCs into the subject. In certain embodiments, treatment with edited autologous CD34+ HSPCs may result in increased HbF induction.

[0206] Prior to harvesting CD34+ HSPCs, in certain embodiments, a subject may discontinue treatment with hydroxyurea, if applicable, and receive blood transfusions to maintain sufficient hemoglobin (Hb) levels. In certain embodiments, a subject may be administered intravenous plerixafor (e.g., 0.24 mg/kg) to mobilize CD34+ HSPCs from bone marrow into peripheral blood. In certain embodiments, a subject may undergo one or more leukapheresis cycles (e.g., approximately one month between cycles, with one cycle defined as two plerixafor-mobilized leukapheresis collections performed on consecutive days). In certain embodiments, the number of leukapheresis cycles performed for a subject may be the number required to achieve a dose of edited autologous CD34+ HSPCs (e.g., ≥2×10⁶ cells/kg, ≥3×10⁶ cells/kg, ≥4×10⁶ cells/kg, ≥5×10⁶ cells/kg, 2×10⁶ cells/kg to 3×10⁶ cells/kg, 3×10⁶ cells/kg to 4×10⁶ cells/kg, 4×10⁶ cells/kg to 5×10⁶ cells/kg) to be reinfused back into the subject, along with a dose of unedited autologous CD34+ HSPCs/kg for backup storage (e.g., >1.5×10⁶ cells/kg). In certain embodiments, the CD34+ HSPCs harvested from the subject may be edited using any of the genome editing methods discussed herein. In certain embodiments, any one or more of the gRNAs and one or more of the RNA-guided nucleases disclosed herein may be used in the genome editing methods.

[0207] In certain embodiments, the treatment may include an autologous stem cell transplant. In certain embodiments, a subject may undergo myeloablative conditioning with busulfan conditioning (e.g., dose-adjusted based on first-dose pharmacokinetic analysis, with a test dose of 1 mg/kg). In certain embodiments, conditioning may occur for four consecutive days. In certain embodiments, following a three-day busulfan washout period, edited autologous CD34+ HSPCs (e.g., ≥2×10⁶ cells/kg, ≥3×10⁶ cells/kg, ≥4×10⁶ cells/kg, >5×10⁶ cells/kg, 2×10⁶ cells/kg to 3×10⁶ cells/kg, 3×10⁶ cells/kg to 4×10⁶ cells/kg, 4×10⁶ cells/kg to 5×10⁶ cells/kg) may be reinfused into the subject (e.g., into peripheral blood). In certain embodiments, the edited autologous CD34+ HSPCs may be manufactured and cryopreserved for a particular subject. In certain embodiments, a subject may attain neutrophil engraftment following a sequential myeloablative conditioning regimen and infusion of edited autologous CD34+ cells. Neutrophil engraftment may be defined as three consecutive measurements of ANC >0.5×10⁹/L.

[0208] However it is implemented, a genome editing system may include, or may be co-delivered with, one or more factors that improve the viability of the cells during and after editing, including without limitation an aryl hydrocarbon receptor antagonist such as StemRegenin-1 (SRI), UM171, LGC0006, alpha-napthoflavone, and CH-223191, and/or an innate immune response antagonist such as cyclosporin A, dexamethasone, reservatrol, a MyD88 inhibitory peptide, an RNAi agent targeting Myd88, a B18R recombinant protein, a glucocorticoid, OxPAPC, a TLR antagonist, rapamycin, BX795, and a RLR shRNA. These and other factors that improve the viability of the cells during and after editing are described in Gori, under the heading “I. Optimization of Stem Cells” from page 36 through page 61, which is incorporated by reference herein.

[0209] The cells, following delivery of the genome editing system, are optionally manipulated e.g. to enrich for HSCs and/or cells in the erythroid lineage and/or for edited cells, to expand them, freeze/thaw, or otherwise prepare the cells for return to the subject. The edited cells are then returned to the subject, for instance in the circulatory system by means of intravenous delivery or delivery or into a solid tissue such as bone marrow.

[0210] Functionally, alteration of the CCAAT box target region, the 13 nt target region, and/or proximal HBG1/2 promoter target sequence using the compositions, methods and genome editing systems of this disclosure results in significant induction, among hemoglobin-expressing cells, of Aγ and/or Gγ subunits (referred to interchangeably as HbF expression), e.g. at least 5%, 10%, 15%, 20%, 25%, 30%, 35%, 40%, 45%, 50% or greater induction of Aγ and/or Gγ subunit expression relative to unmodified controls. This induction of protein expression is generally the result of alteration of the CCAAT box target region, 13 nt target region, and/or proximal HBG1/2 promoter target sequence (expressed, e.g. in terms of the percentage of total genomes comprising indel mutations within the plurality of cells) in some or all of the plurality of cells that are treated, e.g. at least 5%, 10%, 15%, 20%, 25%, 30%, 35%, 40%, 45%, 50% of the plurality of cells comprise at least one allele comprising a sequence alteration, including, without limitation, an indel, insertion, or deletion in or near the CCAAT box target region, 13 nt target region, and/or proximal HBG1/2 promoter target sequence.

[0211] The functional effects of alterations caused or facilitated by the genome editing systems and methods of the present disclosure can be assessed in any number of suitable ways. For example, the effects of alterations on expression of fetal hemoglobin can be assessed at the protein or mRNA level. Expression of HBG1 and HBG2 mRNA can be assessed by digital droplet PCR (ddPCR), which is performed on cDNA samples obtained by reverse transcription of mRNA harvested from treated or untreated samples. Primers for HBG1, HBG2, HBB, and/or HBA may be used individually or multiplexed using methods known in the art. For example, ddPCR analysis of samples may be conducted using the QX200™ ddPCR system commercialized by Bio Rad (Hercules, CA), and associated protocols published by BioRad. Fetal hemoglobin protein may be assessed by high pressure liquid chromatography (HPLC), for example, according to the methods discussed on pp. 143-44 in Chang 2017 (incorporated by reference herein), or fast protein liquid chromatography (FPLC), using ion-exchange and/or reverse phase columns to resolve HbF, HbB and HbA and/or Aγ and Gγ globin chains as is known in the art.

[0212] It should be noted that the rate at which the CCAAT box target region (e.g., 18 nt, 11 nt, 4 nt, 1 nt, c.−117 G>A target regions), 13 nt target region, and/or proximal HBG1/2 promoter target sequence is altered in the target cells can be modified by the use of optional genome editing system components such as oligonucleotide donor templates. Donor template design is described in general terms below under the heading “Donor template design.” Donor templates for use in targeting the 13 nt target region may include, without limitation, donor templates encoding alterations (e.g., deletions) of HBG1 c.−114 to −102 (corresponding to nucleotides 2824-2836 of SEQ ID NO: 902), HBG1 c.−225 to −222 (corresponding to nucleotides 2716-2719 of SEQ ID NO:902)), and/or HBG2 c.−114 to −102 (corresponding to nucleotides 2748-2760 of SEQ ID NO:903). Exemplary 5′ and 3′ homology arms, and exemplary full-length donor templates encoding deletions such as c. −114 to −102 are also presented below. In certain embodiments, donor templates for use in targeting the 18 nt target region may include, without limitation, donor templates encoding alterations (e.g., deletions) of HBG1 c.−104 to −121, HBG2 c.−104 to −121, or a combination thereof. Exemplary full-length donor templates encoding deletions such as c.−104 to −121 include SEQ ID NOs:974 and 975. In certain embodiments, donor templates for use in targeting the 11 nt target region may include, without limitation, donor templates encoding alterations (e.g., deletions) of HBG1 c.−105 to −115, HBG2 c.−105 to −115, or a combination thereof. Exemplary full-length donor templates encoding deletions such as c.−105 to −115 include SEQ ID NOs:976 and 978. In certain embodiments, donor templates for use in targeting the 4 nt target region may include, without limitation, donor templates encoding alterations (e.g., deletions) of HBG1 c.−112 to −115, HBG2 c.−112 to −115, or a combination thereof. Exemplary full-length donor templates encoding deletions such as c.−112 to −115 include SEQ ID NOs:984-995. In certain embodiments, donor templates for use in targeting the 1 nt target region may include, without limitation, donor templates encoding alterations (e.g., deletions) of HBG1 c.−116, HBG2 c.−116, or a combination thereof. Exemplary full-length donor templates encoding deletions such as c.−116 include SEQ ID NOs:982 and 983. In certain embodiments, donor templates for use in targeting the c.−117 G>A target region may include, without limitation, donor templates encoding alterations (e.g., deletions) of HBG1 c.−117 G>A, HBG2 c.−117 G>A, or a combination thereof. Exemplary full-length donor templates encoding deletions such as c.−117 G>A include SEQ ID NOs:980 and 981. In certain embodiments, the donor template may be a positive strand or a negative strand.

[0213] Donor templates used herein may be non-specific templates that are non-homologous to regions of DNA within or near the target sequence. In certain embodiments, donor templates for use in targeting the 13 nt target region may include, without limitation, non-target specific templates that are nonhomologous to regions of DNA within or near the 13 nt target region. For example, a non-specific donor template for use in targeting the 13 nt target region may be non-homologous to the regions of DNA within or near the 13 nt target region and may comprise a donor template encoding the deletion of HBG1 c.−225 to −222 (corresponding to nucleotides 2716-2719 of SEQ ID NO:902).

[0214] The embodiments described herein may be used in all classes of vertebrate including, but not limited to, primates, mice, rats, rabbits, pigs, dogs, and cats.

[0215] This overview has focused on a handful of exemplary embodiments that illustrate the principles of genome editing systems and CRISPR-mediated methods of altering cells. For clarity, however, this disclosure encompasses modifications and variations that have not been expressly addressed above, but will be evident to those of skill in the art. With that in mind, the following disclosure is intended to illustrate the operating principles of genome editing systems more generally. What follows should not be understood as limiting, but rather illustrative of certain principles of genome editing systems and CRISPR-mediated methods utilizing these systems, which, in combination with the instant disclosure, will inform those of skill in the art about additional implementations and modifications that are within its scope.

### RNA-Guided Helicases, Guide RNAs and Dead Guide RNAs

[0216] In certain embodiments of the approaches and methods described above, the alteration of DNA helical structure is achieved through the action of an “RNA-guided helicase,” which term is generally used to refer to a molecule, typically a peptide, that (a) interacts (e.g., complexes) with a gRNA, and (b) together with the gRNA, associates with and unwinds a target site. RNA-guided helicases may, in certain embodiments, comprise RNA-guided nucleases configured to lack nuclease activity. However, the inventors have observed that even a cleavage-competent RNA-guided nuclease may be adapted for use as an RNA-guided helicase by complexing it to a dead gRNA having a truncated targeting domain of 15 or fewer nucleotides in length. Complexes of wild-type RNA-guided nucleases with dead gRNAs exhibit reduced or eliminated RNA-cleavage activity, but appear to retain helicase activity. RNA-guided helicases and dead gRNAs are described in greater detail below.

[0217] Regarding RNA-guided helicases, according to the present disclosure an RNA-guided helicase may comprise any of the RNA-guided nucleases disclosed herein and infra under the heading entitled “RNA-guided nucleases,” including, without limitation, a Cas9 or Cpf1 RNA-guided nuclease. The helicase activity of these RNA-guided nucleases allow for unwinding of DNA, providing increased access of genome editing system components (e.g., without limitation, catalytically active RNA-guided nuclease and gRNAs) to the desired target region to be edited (e.g., the CCAAT box target region, 13 nt target region, and/or proximal HBG1/2 promoter target sequence). In certain embodiments, the RNA-guided nuclease may be a catalytically active RNA-guided nuclease with nuclease activity. In certain embodiments, the RNA-guided helicase may be configured to lack nuclease activity. For example, in certain embodiments, the RNA-guided helicase may be a catalytically inactive RNA-guided nuclease that lacks nuclease activity, such as a catalytically dead Cas9 molecule, which still provides helicase activity. In certain embodiments, an RNA-guided helicase may form a complex with a dead gRNA, forming a dead RNP that cannot cleave nucleic acid. In other embodiments, the RNA-guided helicase may be a catalytically active RNA-guided nuclease complexed to a dead gRNA, forming a dead RNP that cannot cleave nucleic acid. In certain embodiments, the RNA-guided nuclease is not configured to recruit an exogenous trans-acting factor to the desired target region to be edited (e.g., the CCAAT box target region, 13 nt target region, and/or proximal HBG1/2 promoter target sequence).

[0218] Turning to dead gRNAs, these include any of the dead gRNAs discussed herein and infra under the heading entitled “Dead gRNA molecules.” Dead gRNAs (also referred to herein as “dgRNAs”) may be generated by truncating the 5′ end of a gRNA targeting domain sequence, resulting in a targeting domain sequence of 15 nucleotides or fewer in length. Dead guide RNA molecules according to the present disclosure include dead guide RNA molecules that have reduced, low, or undetectable cleavage activity. The targeting domain sequences of dead guide RNAs may be shorter in length by 1, 2, 3, 4, 5, 6, 7, 8, 9, or 10 nucleotides compared to the targeting domain sequence of active guide RNAs. Dead gRNA molecules may comprise targeting domains complementary to regions proximal to or within a target region (e.g., the CCAAT box target region, 13 nt target region, proximal HBG1/2 promoter target sequence, and/or the GATA1 binding motif in BCL11Ae) in a target nucleic acid. In certain embodiments, “proximal to” may denote the region within 10, 25, 50, 100, or 200 nucleotides of a target region (e.g., the CCAAT box target region, 13 nt target region, proximal HBG1/2 promoter target sequence, and/or the GATA1 binding motif in BCL11Ae). In certain embodiments, dead gRNAs comprise targeting domains complementary to the transcription strand or non-transcription strand of DNA. In certain embodiments, the dead guide RNA is not configured to recruit an exogenous trans-acting factor to a target region (e.g., the CCAAT box target region, 13 nt target region, proximal HBG1/2 promoter target sequence, and/or the GATA1 binding motif in BCL11Ae).

[0219] This overview has focused on a handful of exemplary embodiments that illustrate the principles of genome editing systems and CRISPR-mediated methods of altering cells. For clarity, however, this disclosure encompasses modifications and variations that have not been expressly addressed above, but will be evident to those of skill in the art. With that in mind, the following disclosure is intended to illustrate the operating principles of genome editing systems more generally. What follows should not be understood as limiting, but rather illustrative of certain principles of genome editing systems and CRISPR-mediated methods utilizing these systems, which, in combination with the instant disclosure, will inform those of skill in the art about additional implementations and modifications that are within its scope.

### Genome Editing Systems

[0220] The term “genome editing system” refers to any system having RNA-guided DNA editing activity. Genome editing systems of the present disclosure include at least two components adapted from naturally occurring CRISPR systems: a guide RNA (gRNA) and an RNA-guided nuclease. These two components form a complex that is capable of associating with a specific nucleic acid sequence and editing the DNA in or around that nucleic acid sequence, for instance by making one or more of a single-strand break (an SSB or nick), a double-strand break (a DSB) and/or a point mutation.

[0221] Genome editing systems can be implemented (e.g. administered or delivered to a cell or a subject) in a variety of ways, and different implementations may be suitable for distinct applications. For instance, a genome editing system is implemented, in certain embodiments, as a protein/RNA complex (a ribonucleoprotein, or RNP), which can be included in a pharmaceutical composition that optionally includes a pharmaceutically acceptable carrier and/or an encapsulating agent, such as, without limitation, a lipid or polymer micro- or nano-particle, micelle, or liposome. In certain embodiments, a genome editing system is implemented as one or more nucleic acids encoding the RNA-guided nuclease and guide RNA components described above (optionally with one or more additional components); in certain embodiments, the genome editing system is implemented as one or more vectors comprising such nucleic acids, for instance a viral vector such as an adeno-associated virus (see section below under the heading “Implementation of genome editing systems: delivery, formulations, and routes of administration”); and in certain embodiments, the genome editing system is implemented as a combination of any of the foregoing. Additional or modified implementations that operate according to the principles set forth herein will be apparent to the skilled artisan and are within the scope of this disclosure.

[0222] It should be noted that the genome editing systems of the present disclosure can be targeted to a single specific nucleotide sequence, or may be targeted to—and capable of editing in parallel-two or more specific nucleotide sequences through the use of two or more guide RNAs. The use of multiple gRNAs is referred to as “multiplexing” throughout this disclosure, and can be employed to target multiple, unrelated target sequences of interest, or to form multiple SSBs or DSBs within a single target domain and, in some cases, to generate specific edits within such target domain. For example, International Patent Publication No. WO 2015/138510 by Maeder et al. (“Maeder”), which is incorporated by reference herein, describes a genome editing system for correcting a point mutation (C.2991+1655A to G) in the human CEP290 gene that results in the creation of a cryptic splice site, which in turn reduces or eliminates the function of the gene. The genome editing system of Maeder utilizes two guide RNAs targeted to sequences on either side of (i.e. flanking) the point mutation, and forms DSBs that flank the mutation. This, in turn, promotes deletion of the intervening sequence, including the mutation, thereby eliminating the cryptic splice site and restoring normal gene function.

[0223] As another example, WO 2016/073990 by Cotta-Ramusino et al. (“Cotta-Ramusino”), which is incorporated by reference herein, describes a genome editing system that utilizes two gRNAs in combination with a Cas9 nickase (a Cas9 that makes a single strand nick such as S. pyogenes D10A), an arrangement termed a “dual-nickase system.” The dual-nickase system of Cotta-Ramusino is configured to make two nicks on opposite strands of a sequence of interest that are offset by one or more nucleotides, which nicks combine to create a double strand break having an overhang (5′ in the case of Cotta-Ramusino, though 3′ overhangs are also possible). The overhang, in turn, can facilitate homology directed repair events in some circumstances. And, as another example, WO 2015/070083 by Palestrant et al. (incorporated by reference herein) describes a gRNA targeted to a nucleotide sequence encoding Cas9 (referred to as a “governing RNA”), which can be included in a genome editing system comprising one or more additional gRNAs to permit transient expression of a Cas9 that might otherwise be constitutively expressed, for example in some virally transduced cells. These multiplexing applications are intended to be exemplary, rather than limiting, and the skilled artisan will appreciate that other applications of multiplexing are generally compatible with the genome editing systems described here.

[0224] As disclosed herein, in certain embodiments, genome editing systems may comprise multiple gRNAs that may be used to introduce mutations into the GATA1 binding motif in BCL11Ae or the 13 nt target region of HBG1 and/or HBG2. In certain embodiments, genome editing systems disclosed herein may comprise multiple gRNAs used to introduce mutations into the GATA1 binding motif in BCL11Ae and the 13 nt target region of HBG1 and/or HBG2.

[0225] Genome editing systems can, in some instances, form double strand breaks that are repaired by cellular DNA double-strand break mechanisms such as NHEJ or HDR. These mechanisms are described throughout the literature (see, e.g., Davis & Maizels 2014 (describing Alt-HDR); Frit 2014 (describing Alt-NHEJ); Iyama & Wilson 2013 (describing canonical HDR and NHEJ pathways generally)).

[0226] Where genome editing systems operate by forming DSBs, such systems optionally include one or more components that promote or facilitate a particular mode of double-strand break repair or a particular repair outcome. For instance, Cotta-Ramusino also describes genome editing systems in which a single stranded oligonucleotide “donor template” is added; the donor template is incorporated into a target region of cellular DNA that is cleaved by the genome editing system, and can result in a change in the target sequence.

[0227] In certain embodiments, genome editing systems modify a target sequence, or modify expression of a gene in or near the target sequence, without causing single- or double-strand breaks. For example, a genome editing system may include an RNA-guided nuclease fused to a functional domain that acts on DNA, thereby modifying the target sequence or its expression. As one example, an RNA-guided nuclease can be connected to (e.g. fused to) a cytidine deaminase functional domain, and may operate by generating targeted C-to-A substitutions. Exemplary nuclease/deaminase fusions are described in Komor 2016, which is incorporated by reference herein. Alternatively, a genome editing system may utilize a cleavage-inactivated (i.e. a “dead”) nuclease, such as a dead Cas9 (dCas9), and may operate by forming stable complexes on one or more targeted regions of cellular DNA, thereby interfering with functions involving the targeted region(s) including, without limitation, mRNA transcription, chromatin remodeling, etc. In certain embodiments, a genome editing system may include an RNA-guided helicase that unwinds DNA within or proximal to the target sequence, without causing single- or double-stranded breaks. For example a genome editing system may include an RNA-guided helicase configured to associate within or near the target sequence to unwind DNA and induce accessibility to the target sequence. In certain embodiments, the RNA-guided helicase may be complexed to a dead guide RNA that is configured to lack cleavage activity allowing for unwinding of the DNA without causing breaks in the DNA.

Guide RNA (gRNA) Molecules

[0228] The terms “guide RNA” and “gRNA” refer to any nucleic acid that promotes the specific association (or “targeting”) of an RNA-guided nuclease such as a Cpf1 molecule to a target sequence such as a genomic or episomal sequence in a cell. gRNAs can be unimolecular (comprising a single RNA molecule, and referred to alternatively as chimeric), or modular (comprising more than one, and typically two, separate RNA molecules, such as a crRNA and a tracrRNA, which are usually associated with one another, for instance by duplexing). gRNAs and their component parts are described throughout the literature (see, e.g., Briner 2014, which is incorporated by reference; Cotta-Ramusino). Examples of modular and unimolecular gRNAs that may be used according to the embodiments herein include, without limitation, the sequences set forth in SEQ ID NOs:29-31 and 38-51. Examples of gRNA proximal and tail domains that may be used according to the embodiments herein include, without limitation, the sequences set forth in SEQ ID NOs:32-37.

[0229] In bacteria and archea, type II CRISPR systems generally comprise an RNA-guided nuclease protein such as Cas9, a CRISPR RNA (crRNA) that includes a 5′ region that is complementary to a foreign sequence, and a trans-activating crRNA (tracrRNA) that includes a 5′ region that is complementary to, and forms a duplex with, a 3′ region of the crRNA. While not intending to be bound by any theory, it is thought that this duplex facilitates the formation of—and is necessary for the activity of—the Cas9/gRNA complex. As type II CRISPR systems were adapted for use in gene editing, it was discovered that the crRNA and tracrRNA could be joined into a single unimolecular or chimeric guide RNA, in one non-limiting example, by means of a four nucleotide (e.g. GAAA) “tetraloop” or “linker” sequence bridging complementary regions of the crRNA (at its 3′ end) and the tracrRNA (at its 5′ end). (Mali 2013; Jiang 2013; Jinek 2012; all incorporated by reference herein).

[0230] Guide RNAs, whether unimolecular or modular, include a “targeting domain” that is fully or partially complementary to a target domain within a target sequence, such as a DNA sequence in the genome of a cell where editing is desired. Targeting domains are referred to by various names in the literature, including without limitation “guide sequences” (Hsu 2013, incorporated by reference herein), “complementarity regions” (Cotta-Ramusino), “spacers” (Briner 2014) and generically as “crRNAs” (Jiang). Irrespective of the names they are given, targeting domains are typically 10-30 nucleotides in length, and in certain embodiments are 16-24 nucleotides in length (for instance, 16, 17, 18, 19, 20, 21, 22, 23 or 24 nucleotides in length), and are at or near the 5′ terminus of in the case of a Cas9 gRNA, and at or near the 3′ terminus in the case of a Cpf1 gRNA.

[0231] In addition to the targeting domains, gRNAs typically (but not necessarily, as discussed below) include a plurality of domains that may influence the formation or activity of gRNA/Cas9 complexes. For instance, as mentioned above, the duplexed structure formed by first and secondary complementarity domains of a gRNA (also referred to as a repeat:anti-repeat duplex) interacts with the recognition (REC) lobe of Cas9 and can mediate the formation of Cas9/gRNA complexes (Nishimasu 2014; Nishimasu 2015; both incorporated by reference herein). It should be noted that the first and/or second complementarity domains may contain one or more poly-A tracts, which can be recognized by RNA polymerases as a termination signal. The sequence of the first and second complementarity domains are, therefore, optionally modified to eliminate these tracts and promote the complete in vitro transcription of gRNAs, for instance through the use of A-G swaps as described in Briner 2014, or A-U swaps. These and other similar modifications to the first and second complementarity domains are within the scope of the present disclosure.

[0232] Along with the first and second complementarity domains, Cas9 gRNAs typically include two or more additional duplexed regions that are involved in nuclease activity in vivo but not necessarily in vitro. (Nishimasu 2015). A first stem-loop one near the 3′ portion of the second complementarity domain is referred to variously as the “proximal domain,” (Cotta-Ramusino) “stem loop 1” (Nishimasu 2014 and 2015) and the “nexus” (Briner 2014). One or more additional stem loop structures are generally present near the 3′ end of the gRNA, with the number varying by species: S. pyogenes gRNAs typically include two 3′ stem loops (for a total of four stem loop structures including the repeat:anti-repeat duplex), while S. aureus and other species have only one (for a total of three stem loop structures). A description of conserved stem loop structures (and gRNA structures more generally) organized by species is provided in Briner 2014.

[0233] While the foregoing description has focused on gRNAs for use with Cas9, it should be appreciated that other RNA-guided nucleases exist which utilize gRNAs that differ in some ways from those described to this point. For instance, Cpf1 (“CRISPR from Prevotella and Franciscella 1”) is a recently discovered RNA-guided nuclease that does not require a tracrRNA to function. (Zetsche 2015, incorporated by reference herein). A gRNA for use in a Cpf1 genome editing system generally includes a targeting domain and a complementarity domain (alternately referred to as a “handle”). It should also be noted that, in gRNAs for use with Cpf1, the targeting domain is usually present at or near the 3′ end, rather than the 5′ end as described above in connection with Cas9 gRNAs (the handle is at or near the 5′ end of a Cpf1 gRNA). Exemplary targeting domains of Cpf1 gRNAs are set forth in Table 6 and Table 12.

[0234] Those of skill in the art will appreciate, however, that although structural differences may exist between gRNAs from different prokaryotic species, or between Cpf1 and Cas9 gRNAs, the principles by which gRNAs operate are generally consistent. Because of this consistency of operation, gRNAs can be defined, in broad terms, by their targeting domain sequences, and skilled artisans will appreciate that a given targeting domain sequence can be incorporated in any suitable gRNA, including a unimolecular or chimeric gRNA, or a gRNA that includes one or more chemical modifications and/or sequential modifications (substitutions, additional nucleotides, truncations, etc.). Thus, for economy of presentation in this disclosure, gRNAs may be described solely in terms of their targeting domain sequences.

[0235] More generally, skilled artisans will appreciate that some aspects of the present disclosure relate to systems, methods and compositions that can be implemented using multiple RNA-guided nucleases. For this reason, unless otherwise specified, the term gRNA should be understood to encompass any suitable gRNA that can be used with any RNA-guided nuclease, and not only those gRNAs that are compatible with a particular species of Cas9 or Cpf1. By way of illustration, the term gRNA can, in certain embodiments, include a gRNA for use with any RNA-guided nuclease occurring in a Class 2 CRISPR system, such as a type II or type V or CRISPR system, or an RNA-guided nuclease derived or adapted therefrom.

gRNA Design

[0236] Methods for selection and validation of target sequences as well as off-target analyses have been described previously (see, e.g., Mali 2013; Hsu 2013; Fu 2014; Heigwer 2014; Bae 2014; Xiao 2014). Each of these references is incorporated by reference herein. As a non-limiting example, gRNA design may involve the use of a software tool to optimize the choice of potential target sequences corresponding to a user's target sequence, e.g., to minimize total off-target activity across the genome. While off-target activity is not limited to cleavage, the cleavage efficiency at each off-target sequence can be predicted, e.g., using an experimentally-derived weighting scheme. These and other guide selection methods are described in detail in Maeder and Cotta-Ramusino.

[0237] Targeting domain sequences of gRNAs that were designed to target disruption of the CCAAT box target region include, but are not limited to, SEQ ID NO:1002. In certain embodiments, gRNAs comprising the sequence set forth in SEQ ID NO:1002 may be complexed with a Cpf1 protein or modified Cpf1 protein to generate alterations at the CCAAT box target region. In certain embodiments, gRNAs comprising any of the Cpf1 gRNAs set forth in Table 9, Table 12, or Table 13 may be complexed with a Cpf1 protein or modified Cpf1 protein forming an RNP (“gRNA-Cpf1-RNP”) to generate alterations at the CCAAT box target region. In certain embodiments, the modified Cpf1 protein may be His-AsCpf1-nNLS (SEQ ID NO: 1000) or His-AsCpf1-sNLS-sNLS (SEQ ID NO:1001). In certain embodiments, the Cpf1 molecule of the gRNA-Cpf1-RNP may be encoded by a sequence set forth in SEQ ID NOs:1000, 1001, 1008-1018, 1032, 1035-39 (Cpf1 polypeptide sequences) or SEQ ID NOs:1019-1021 (Cpf1 polynucleotide sequences).

gRNA Modifications

[0238] The activity, stability, or other characteristics of gRNAs can be altered through the incorporation of certain modifications. As one example, transiently expressed or delivered nucleic acids can be prone to degradation by, e.g., cellular nucleases. Accordingly, the gRNAs described herein can contain one or more modified nucleosides or nucleotides which introduce stability toward nucleases. While not wishing to be bound by theory it is also believed that certain modified gRNAs described herein can exhibit a reduced innate immune response when introduced into cells. Those of skill in the art will be aware of certain cellular responses commonly observed in cells, e.g., mammalian cells, in response to exogenous nucleic acids, particularly those of viral or bacterial origin. Such responses, which can include induction of cytokine expression and release and cell death, may be reduced or eliminated altogether by the modifications presented herein.

[0239] Certain exemplary modifications discussed in this section can be included at any position within a gRNA sequence including, without limitation at or near the 5′ end (e.g., within 1-10, 1-5, or 1-2 nucleotides of the 5′ end) and/or at or near the 3′ end (e.g., within 1-10, 1-5, or 1-2 nucleotides of the 3′ end). In some cases, modifications are positioned within functional motifs, such as the repeat-anti-repeat duplex of a Cas9 gRNA, a stem loop structure of a Cas9 or Cpf1 gRNA, and/or a targeting domain of a gRNA.

[0240] As one example, the 5′ end of a gRNA can include a eukaryotic mRNA cap structure or cap analog (e.g., a G(5′)ppp(5′)G cap analog, a m7G(5′)ppp(5′)G cap analog, or a 3′-O-Me-m7G(5′)ppp(5′)G anti reverse cap analog (ARCA)), as shown below:

[chemical structure]

[0241] The cap or cap analog can be included during either chemical synthesis or in vitro transcription of the gRNA.

[0242] Along similar lines, the 5′ end of the gRNA can lack a 5′ triphosphate group. For instance, in vitro transcribed gRNAs can be phosphatase-treated (e.g., using calf intestinal alkaline phosphatase) to remove a 5′ triphosphate group.

[0243] Another common modification involves the addition, at the 3′ end of a gRNA, of a plurality (e.g., 1-10, 10-20, or 25-200) of adenine (A) residues referred to as a polyA tract. The polyA tract can be added to a gRNA during chemical synthesis, following in vitro transcription using a polyadenosine polymerase (e.g., E. coli Poly(A)Polymerase), or in vivo by means of a polyadenylation sequence, as described in Maeder.

[0244] It should be noted that the modifications described herein can be combined in any suitable manner, e.g. a gRNA, whether transcribed in vivo from a DNA vector, or in vitro transcribed gRNA, can include either or both of a 5′ cap structure or cap analog and a 3′ polyA tract.

[0245] Guide RNAs can be modified at a 3′ terminal U ribose. For example, the two terminal hydroxyl groups of the U ribose can be oxidized to aldehyde groups and a concomitant opening of the ribose ring to afford a modified nucleoside as shown below:

[chemical structure]

[0246] wherein “U” can be an unmodified or modified uridine.

[0247] The 3′ terminal U ribose can be modified with a 2′3′ cyclic phosphate as shown below:

[chemical structure]

[0248] wherein “U” can be an unmodified or modified uridine.

[0249] Guide RNAs can contain 3′ nucleotides which can be stabilized against degradation, e.g., by incorporating one or more of the modified nucleotides described herein. In certain embodiments, uridines can be replaced with modified uridines, e.g., 5-(2-amino)propyl uridine, and 5-bromo uridine, or with any of the modified uridines described herein; adenosines and guanosines can be replaced with modified adenosines and guanosines, e.g., with modifications at the 8-position, e.g., 8-bromo guanosine, or with any of the modified adenosines or guanosines described herein.

[0250] In certain embodiments, sugar-modified ribonucleotides can be incorporated into the gRNA, e.g., wherein the 2′ OH-group is replaced by a group selected from H, —OR, —R (wherein R can be, e.g., alkyl, cycloalkyl, aryl, aralkyl, heteroaryl or sugar), halo, —SH, —SR (wherein R can be, e.g., alkyl, cycloalkyl, aryl, aralkyl, heteroaryl or sugar), amino (wherein amino can be, e.g., NH₂; alkylamino, dialkylamino, heterocyclyl, arylamino, diarylamino, heteroarylamino, diheteroarylamino, or amino acid); or cyano (—CN). In certain embodiments, the phosphate backbone can be modified as described herein, e.g., with a phosphorothioate (PhTx) group. In certain embodiments, one or more of the nucleotides of the gRNA can each independently be a modified or unmodified nucleotide including, but not limited to 2′-sugar modified, such as, 2′-O-methyl, 2′-O-methoxyethyl, or 2′-Fluoro modified including, e.g., 2′-F or 2′-O-methyl, adenosine (A), 2′-F or 2′-O-methyl, cytidine (C), 2′-F or 2′-O-methyl, uridine (U), 2′-F or 2′-O-methyl, thymidine (T), 2′-F or 2′-O-methyl, guanosine (G), 2′-O-methoxyethyl-5-methyluridine (Teo), 2′-O-methoxyethyladenosine (Aeo), 2′-O-methoxyethyl-5-methylcytidine (m5Ceo), and any combinations thereof.

[0251] Guide RNAs can also include “locked” nucleic acids (LNA) in which the 2′ OH-group can be connected, e.g., by a C1-6 alkylene or C1-6 heteroalkylene bridge, to the 4′ carbon of the same ribose sugar. Any suitable moiety can be used to provide such bridges, include without limitation methylene, propylene, ether, or amino bridges; O-amino (wherein amino can be, e.g., NH₂; alkylamino, dialkylamino, heterocyclyl, arylamino, diarylamino, heteroarylamino, or diheteroarylamino, ethylenediamine, or polyamino) and aminoalkoxy or O(CH₂)ₙ-amino (wherein amino can be, e.g., NH₂; alkylamino, dialkylamino, heterocyclyl, arylamino, diarylamino, heteroarylamino, or diheteroarylamino, ethylenediamine, or polyamino).

[0252] In certain embodiments, a gRNA can include a modified nucleotide which is multicyclic (e.g., tricyclo; and “unlocked” forms, such as glycol nucleic acid (GNA) (e.g., R-GNA or S-GNA, where ribose is replaced by glycol units attached to phosphodiester bonds), or threose nucleic acid (TNA, where ribose is replaced with α-L-threofuranosyl-(3′→2′)).

[0253] Generally, gRNAs include the sugar group ribose, which is a 5-membered ring having an oxygen. Exemplary modified gRNAs can include, without limitation, replacement of the oxygen in ribose (e.g., with sulfur (S), selenium (Se), or alkylene, such as, e.g., methylene or ethylene); addition of a double bond (e.g., to replace ribose with cyclopentenyl or cyclohexenyl); ring contraction of ribose (e.g., to form a 4-membered ring of cyclobutane or oxetane); ring expansion of ribose (e.g., to form a 6- or 7-membered ring having an additional carbon or heteroatom, such as for example, anhydrohexitol, altritol, mannitol, cyclohexanyl, cyclohexenyl, and morpholino that also has a phosphoramidate backbone). Although the majority of sugar analog alterations are localized to the 2′ position, other sites are amenable to modification, including the 4′ position. In certain embodiments, a gRNA comprises a 4′-S, 4′-Se or a 4′-C-aminomethyl-2′-O-Me modification.

[0254] In certain embodiments, deaza nucleotides, e.g., 7-deaza-adenosine, can be incorporated into the gRNA. In certain embodiments, O- and N-alkylated nucleotides, e.g., N6-methyl adenosine, can be incorporated into the gRNA. In certain embodiments, one or more or all of the nucleotides in a gRNA are deoxynucleotides.

[0255] In certain embodiments, gRNAs as used herein may be modified or unmodified gRNAs. In certain embodiments, a gRNA may include one or more modifications. In certain embodiments, the one or more modifications may include a phosphorothioate linkage modification, a phosphorodithioate (PS2) linkage modification, a 2′-O-methyl modification, or combinations thereof. In certain embodiments, the one or more modifications may be at the 5′ end of the gRNA, at the 3′ end of the gRNA, or combinations thereof.

[0256] In certain embodiments, a gRNA modification may comprise one or more phosphorodithioate (PS2) linkage modifications.

[0257] In some embodiments, a gRNA used herein includes one or more or a stretch of deoxyribonucleic acid (DNA) bases, also referred to herein as a “DNA extension.” In some embodiments, a gRNA used herein includes a DNA extension at the 5′ end of the gRNA, the 3′ end of the gRNA, or a combination thereof. In certain embodiments, the DNA extension may be 1, 2, 3, 4, 5, 6, 7, 8, 9, 10, 11, 12, 13, 14, 15, 16, 17, 18, 19, 20, 21, 22, 23, 24, 25, 26, 27, 28, 29, 30, 31, 32, 33, 34, 35, 36, 37, 38, 39, 40, 41, 4243, 44, 45, 46, 47, 48, 49, 50, 51, 52, 53, 54, 55, 56, 57, 58, 59 60, 61, 62, 63, 64, 65, 66, 67, 68, 69, 70,71, 72, 73, 74, 75, 76, 77, 78, 79, 80, 81, 82, 83, 84, 85, 86, 87, 88, 89, 90, 91, 92, 93, 94, 95, 96, 97, 98, 99, or 100 DNA bases long. For example, in certain embodiments, the DNA extension may be 1, 2, 3, 4, 5, 10, 15, 20, or 25 DNA bases long. In certain embodiments, the DNA extension may include one or more DNA bases selected from adenine (A), guanine (G), cytosine (C), or thymine (T). In certain embodiments, the DNA extension includes the same DNA bases. For example, the DNA extension may include a stretch of adenine (A) bases. In certain embodiments, the DNA extension may include a stretch of thymine (T) bases. In certain embodiments, the DNA extension includes a combination of different DNA bases. In certain embodiments, a DNA extension may comprise a sequence set forth in Table 18. For example, a DNA extension may comprise a sequence set forth in SEQ ID NOs:1235-1250. In certain embodiments, a gRNA used herein includes a DNA extension as well as one or more phosphorothioate linkage modifications, one or more phosphorodithioate (PS2) linkage modifications, one or more 2′-O-methyl modifications, or combinations thereof. In certain embodiments, the one or more modifications may be at the 5′ end of the gRNA, at the 3′ end of the gRNA, or combinations thereof. In certain embodiments, a gRNA including a DNA extension may comprise a sequence set forth in Table 13 that includes a DNA extension. In a particular embodiment, a gRNA including a DNA extension may comprise the sequence set forth in SEQ ID NO:1051. In certain embodiments, a gRNA including a DNA extension may comprise a sequence selected from the group consisting of SEQ ID NOs:1046-1060, 1067, 1068, 1074, 1075, 1078, 1081-1084, 1086-1087, 1089-1090, 1092-1093, 1098-1102, and 1106. Without wishing to be bound by theory, it is contemplated that any DNA extension may be used herein, so long as it does not hybridize to the target nucleic acid being targeted by the gRNA and it also exhibits an increase in editing at the target nucleic acid site relative to a gRNA which does not include such a DNA extension.

[0258] In some embodiments, a gRNA used herein includes one or more or a stretch of ribonucleic acid (RNA) bases, also referred to herein as an “RNA extension.” In some embodiments, a gRNA used herein includes an RNA extension at the 5′ end of the gRNA, the 3′ end of the gRNA, or a combination thereof. In certain embodiments, the RNA extension may be 1, 2, 3, 4, 5, 6, 7, 8, 9, 10, 11, 12, 13, 14, 15, 16, 17, 18, 19, 20, 21, 22, 23, 24, 25, 26, 27, 28, 29, 30, 31, 32, 33, 34, 35, 36, 37, 38, 39, 40, 41, 42, 43, 44, 45, 46, 47, 48, 49, 50, 51, 52, 53, 54, 55, 56, 57, 58, 59, 60, 61, 62, 63, 64, 65, 66, 67, 68, 69, 70, 71, 72, 73, 74, 75, 76, 77, 78, 79, 80, 81, 82, 83, 84, 85, 86, 87, 88, 89, 90, 91, 92, 93, 94, 95, 96, 97, 98, 99, or 100 RNA bases long. For example, in certain embodiments, the RNA extension may be 1, 2, 3, 4, 5, 10, 15, 20, or 25 RNA bases long. In certain embodiments, the RNA extension may include one or more RNA bases selected from adenine (rA), guanine (rG), cytosine (rC), or uracil (rU), in which the “r” represents RNA, 2T-hydroxy. In certain embodiments, the RNA extension includes the same RNA bases. For example, the RNA extension may include a stretch of adenine (rA) bases. In certain embodiments, the RNA extension includes a combination of different RNA bases. In certain embodiments, an RNA extension may comprise a sequence set forth in Table 18. For example, an RNA extension may comprise a sequence set forth in 1231-1234, 1251-1253. In certain embodiments, a gRNA used herein includes an RNA extension as well as one or more phosphorothioate linkage modifications, one or more phosphorodithioate (PS2) linkage modifications, one or more 2′-O-methyl modifications, or combinations thereof. In certain embodiments, the one or more modifications may be at the 5′ end of the gRNA, at the 3′ end of the gRNA, or combinations thereof. In certain embodiments, a gRNA including a RNA extension may comprise a sequence set forth in Table 13 that includes an RNA extension. gRNAs including an RNA extension at the 5′ end of the gRNA may comprise a sequence selected from the group consisting of SEQ ID NOs:1042-1045, 1103-1105. gRNAs including an RNA extension at the 3′ end of the gRNA may comprise a sequence selected from the group consisting of SEQ ID NOs:1070-1075, 1079, 1081, 1098-1100.

[0259] It is contemplated that gRNAs used herein may also include an RNA extension and a DNA extension. In certain embodiments, the RNA extension and DNA extension may both be at the 5′ end of the gRNA, the 3′ end of the gRNA, or a combination thereof. In certain embodiments, the RNA extension is at the 5′ end of the gRNA and the DNA extension is at the 3′ end of the gRNA. In certain embodiments, the RNA extension is at the 3′ end of the gRNA and the DNA extension is at the 5′ end of the gRNA.

[0260] In some embodiments, a gRNA which includes both a phosphorothioate modification at the 3′ end as well as a DNA extension at the 5′ end is complexed with a RNA-guided nuclease, e.g., Cpf1, to form an RNP, which is then employed to edit a hematopoietic stem cell (HSC) or a CD34+ cell ex vivo (i.e., outside the body of a subject from whom such a cell is derived), at the HBG locus.

[0261] An example of a gRNA as used herein comprises the sequence set forth in SEQ ID NO:1051.

Dead gRNA Molecules

[0262] Dead guide RNA (dgRNA) molecules according to the present disclosure include dead guide RNA molecules that comprise reduced, low, or undetectable cleavage activity. The targeting domain sequences of dead guide RNAs are shorter in length by 1, 2, 3, 4, 5, 6, 7, 8, 9, or 10 nucleotides compared to the targeting domain sequence of active guide RNAs. In certain embodiments, dead guide RNA molecules may comprise a targeting domain comprising 15 nucleotides or fewer in length, 14 nucleotides or fewer in length, 13 nucleotides or fewer in length, 12 nucleotides or fewer in length, or 11 nucleotides or fewer in length. In some embodiments, dead guide RNAs are configured such that they do not provide an RNA guided-nuclease cleavage event. Dead guide RNAs may be generated by removing the 5′ end of a gRNA targeting domain sequence, which results in a truncated targeting domain sequence. For example, if a gRNA sequence, configured to provide a cleavage event (i.e., 17 nucleotides or more in length), has a targeting domain sequence that is 20 nucleotides in length, a dead guide RNA may be created by removing 5 nucleotides from the 5′ end of the gRNA sequence. For example, dgRNAs used herein may comprise a targeting domain set forth in, for example, Tables 8, 9, or 13 that has been truncated from the 5′ end of the gRNA sequence and comprises 15 nucleotides or fewer in length. In certain embodiments, the dgRNA may be configured to bind (or associate with) a nucleic acid sequence within or proximal to a target region (e.g., the CCAAT box target region, 13 nt target region, proximal HBG1/2 promoter target sequence) to be edited. In certain embodiments, proximal to may denote the region within 10, 25, 50, 100, or 200 nucleotides of a target region (e.g., the CCAAT box target region, 13 nt target region, proximal HBG1/2 promoter target sequence). In certain embodiments, the dead guide RNA is not configured to recruit an exogenous trans-acting factor to a target region. In certain embodiments, the dgRNA is configured such that it does not provide a DNA cleavage event when complexed with an RNA-guided nuclease. Skilled artisans will appreciate that dead guide RNA molecules may be designed to comprise targeting domains complementary to regions proximal to or within a target region in a target nucleic acid. In certain embodiments, dead guide RNAs comprise targeting domain sequences that are complementary to the transcription strand or non-transcription strand of double stranded DNA. The dgRNAs herein may include modifications at the 5′ and 3′ end of the dgRNA as described for guide RNAs in the section “gRNA modifications” herein. For example, in certain embodiments, dead guide RNAs may include an anti-reverse cap analog (ARCA) at the 5′ end of the RNA. In certain embodiments, dgRNAs may include a polyA tail at the 3′ end.

[0263] In certain embodiments, the use of a dead guide RNA with the genome editing systems and methods disclosed herein may increase the total editing level of an active guide RNA. In certain embodiments, the use of a dead guide RNA with the genome editing systems disclosed herein and methods thereof may increase the frequency of deletions. In certain embodiments, the deletions may extend from the cut site of the active guide RNA toward the dead guide RNA binding site. In this way the dead guide RNA can change the directionality of an active guide RNA and orient editing toward a desired target region.

[0264] As used herein, the terms “dead gRNA” and “truncated gRNA” are used interchangeably.

### RNA-Guided Nucleases

[0265] RNA-guided nucleases according to the present disclosure include, but are not limited to, naturally-occurring Class 2 CRISPR nucleases such as Cpf1, and Cas9, as well as other nucleases derived or obtained therefrom. It has also been shown that certain RNA-guided nucleases, such as Cas9, also have helicase activity that enables them to unwind nucleic acid. In certain embodiments, the RNA-guided helicases according to the present disclosure may be any of the RNA-nucleases described herein and supra in the section entitled “RNA-guided nucleases.” In certain embodiments, the RNA-guided nuclease is not configured to recruit an exogenous trans-acting factor to a target region. In certain embodiments, an RNA-guided helicase may be an RNA-guided nuclease configured to lack nuclease activity. For example, in certain embodiments, an RNA-guided helicase may be a catalytically inactive RNA-guided nuclease that lacks nuclease activity, but still retains its helicase activity. In certain embodiments, an RNA-guided nuclease may be mutated to abolish its nuclease activity (e.g., dead Cas9), creating a catalytically inactive RNA-guided nuclease that is unable to cleave nucleic acid, but which can still unwind DNA. In certain embodiments, an RNA-guided helicase may be complexed with any of the dead guide RNAs as described herein. For example, a catalytically active RNA-guided helicase (e.g., Cas9 or Cpf1) may form an RNP complex with a dead guide RNA, resulting in a catalytically inactive dead RNP (dRNP). In certain embodiments, a catalytically inactive RNA-guided helicase (e.g., dead Cas9) and a dead guide RNA may form a dRNP. These dRNPs, although incapable of providing a cleavage event, still retain their helicase activity that is important for unwinding nucleic acid.

[0266] In functional terms, RNA-guided nucleases are defined as those nucleases that: (a) interact with (e.g. complex with) a gRNA; and (b) together with the gRNA, associate with, and optionally cleave or modify, a target region of a DNA that includes (i) a sequence complementary to the targeting domain of the gRNA and, optionally, (ii) an additional sequence referred to as a “protospacer adjacent motif,” or “PAM,” which is described in greater detail below. As the following examples will illustrate, RNA-guided nucleases can be defined, in broad terms, by their PAM specificity and cleavage activity, even though variations may exist between individual RNA-guided nucleases that share the same PAM specificity or cleavage activity. Skilled artisans will appreciate that some aspects of the present disclosure relate to systems, methods and compositions that can be implemented using any suitable RNA-guided nuclease having a certain PAM specificity and/or cleavage activity. For this reason, unless otherwise specified, the term RNA-guided nuclease should be understood as a generic term, and not limited to any particular type (e.g. Cas9 vs. Cpf1), species (e.g. S. pyogenes vs. S. aureus) or variation (e.g. full-length vs. truncated or split; naturally-occurring PAM specificity vs. engineered PAM specificity, etc.) of RNA-guided nuclease. For example, in certain embodiments, the RNA-guided nuclease may be Cas-qD (Pausch 2020).

[0267] Various RNA-guided nucleases may require different sequential relationships between PAMs and protospacers. In general, Cas9s recognize PAM sequences that are 3′ of the protospacer. Cpf1, on the other hand, generally recognizes PAM sequences that are 5′ of the protospacer.

[0268] In addition to recognizing specific sequential orientations of PAMs and protospacers, RNA-guided nucleases can also recognize specific PAM sequences. S. aureus Cas9, for instance, recognizes a PAM sequence of NNGRRT or NNGRRV, wherein the N residues are immediately 3′ of the region recognized by the gRNA targeting domain. S. pyogenes Cas9 recognizes NGG PAM sequences. And F. novicida Cpf1 recognizes a TTN PAM sequence. PAM sequences have been identified for a variety of RNA-guided nucleases, and a strategy for identifying novel PAM sequences has been described by Shmakov 2015. It should also be noted that engineered RNA-guided nucleases can have PAM specificities that differ from the PAM specificities of reference molecules (for instance, in the case of an engineered RNA-guided nuclease, the reference molecule may be the naturally occurring variant from which the RNA-guided nuclease is derived, or the naturally occurring variant having the greatest amino acid sequence homology to the engineered RNA-guided nuclease). Examples of PAMs that may be used according to the embodiments herein include, without limitation, the sequences set forth in SEQ ID NOs:199-205.

[0269] In addition to their PAM specificity, RNA-guided nucleases can be characterized by their DNA cleavage activity: naturally-occurring RNA-guided nucleases typically form DSBs in target nucleic acids, but engineered variants have been produced that generate only SSBs (discussed above and in Ran & Hsu 2013, incorporated by reference herein), or that do not cut at all.

### Cas9

[0270] Crystal structures have been determined for S. pyogenes Cas9 (Jinek 2014), and for S. aureus Cas9 in complex with a unimolecular guide RNA and a target DNA (Nishimasu 2014; Anders 2014; and Nishimasu 2015).

[0271] A naturally occurring Cas9 protein comprises two lobes: a recognition (REC) lobe and a nuclease (NUC) lobe; each of which comprise particular structural and/or functional domains. The REC lobe comprises an arginine-rich bridge helix (BH) domain, and at least one REC domain (e.g. a REC1 domain and, optionally, a REC2 domain). The REC lobe does not share structural similarity with other known proteins, indicating that it is a unique functional domain. While not wishing to be bound by any theory, mutational analyses suggest specific functional roles for the BH and REC domains: the BH domain appears to play a role in gRNA:DNA recognition, while the REC domain is thought to interact with the repeat:anti-repeat duplex of the gRNA and to mediate the formation of the Cas9/gRNA complex.

[0272] The NUC lobe comprises a RuvC domain, an HNH domain, and a PAM-interacting (PI) domain. The RuvC domain shares structural similarity to retroviral integrase superfamily members and cleaves the non-complementary (i.e. bottom) strand of the target nucleic acid. It may be formed from two or more split RuvC motifs (such as RuvC I, RuvCII, and RuvCIII in S. pyogenes and S. aureus). The HNH domain, meanwhile, is structurally similar to HNN endonuclease motifs, and cleaves the complementary (i.e. top) strand of the target nucleic acid. The PI domain, as its name suggests, contributes to PAM specificity. Examples of polypeptide sequences encoding Cas9 RuvC-like and Cas9 HNH-like domains that may be used according to the embodiments herein are set forth in SEQ ID NOs:15-23, 52-123 (RuvC-like domains) and SEQ ID NOs:24-28, 124-198 (HNH-like domains).

[0273] While certain functions of Cas9 are linked to (but not necessarily fully determined by) the specific domains set forth above, these and other functions may be mediated or influenced by other Cas9 domains, or by multiple domains on either lobe. For instance, in S. pyogenes Cas9, as described in Nishimasu 2014, the repeat:antirepeat duplex of the gRNA falls into a groove between the REC and NUC lobes, and nucleotides in the duplex interact with amino acids in the BH, PI, and REC domains. Some nucleotides in the first stem loop structure also interact with amino acids in multiple domains (PI, BH and REC1), as do some nucleotides in the second and third stem loops (RuvC and PI domains). Examples of polypeptide sequences encoding Cas9 molecules that may be used according to the embodiments herein are set forth in SEQ ID NOs:1-2, 4-6, 12, and 14.

### Cpf1

[0274] The crystal structure of Acidaminococcus sp. Cpf1 in complex with crRNA and a double-stranded (ds) DNA target including a TTTN PAM sequence has been solved by Yamano 2016 (incorporated by reference herein). Cpf1, like Cas9, has two lobes: a REC (recognition) lobe, and a NUC (nuclease) lobe. The REC lobe includes REC1 and REC2 domains, which lack similarity to any known protein structures. The NUC lobe, meanwhile, includes three RuvC domains (RuvC-I, -II and -III) and a BH domain. However, in contrast to Cas9, the Cpf1 REC lobe lacks an HNH domain, and includes other domains that also lack similarity to known protein structures: a structurally unique PI domain, three Wedge (WED) domains (WED-I, -II and -III), and a nuclease (Nuc) domain.

[0275] While Cas9 and Cpf1 share similarities in structure and function, it should be appreciated that certain Cpf1 activities are mediated by structural domains that are not analogous to any Cas9 domains. For instance, cleavage of the complementary strand of the target DNA appears to be mediated by the Nuc domain, which differs sequentially and spatially from the HNH domain of Cas9. Additionally, the non-targeting portion of Cpf1 gRNA (the handle) adopts a pseudoknot structure, rather than a stem loop structure formed by the repeat:antirepeat duplex in Cas9 gRNAs.

[0276] In certain embodiments, a Cpf1 protein may be a modified Cpf1 protein. In certain embodiments, a modified Cpf1 protein may include one or more modifications. In certain embodiments the modifications may be, without limitation, one or more mutations in a Cpf1 nucleotide sequence or Cpf1 amino acid sequence, one or more additional sequences such as a His tag or a nuclear localization signal (NLS), or a combination thereof. In certain embodiments, a modified Cpf1 may also be referred to herein as a Cpf1 variant.

[0277] In certain embodiments, the Cpf1 protein may be derived from a Cpf1 protein selected from the group consisting of Acidaminococcus sp. strain BV3L6 Cpf1 protein (AsCpf1), Lachnospiraceae bacterium ND2006 Cpf1 protein (LbCpf1), and Lachnospiraceae bacterium MA2020 (Lb2Cpf1). In certain embodiments, the Cpf1 protein may comprise a sequence selected from the group consisting of SEQ ID NOs:1016-1018, having the codon-optimized nucleic acid sequences of SEQ ID NOs:1019-1021, respectively.

[0278] In certain embodiments, the modified Cpf1 protein may comprise a nuclear localization signal (NLS). For example, but not by way of limitation, NLS sequences useful in connection with the methods and compositions disclosed herein will comprise an amino acid sequence capable of facilitating protein import into the cell nucleus. NLS sequences useful in connection with the methods and compositions disclosed herein are known in the art. Examples of such NLS sequences include the nucleoplasmin NLS having the amino acid sequence: KRPAATKKAGQAKKKK (SEQ ID NO:1006) and the simian virus 40 “SV40” NLS having the amino acid sequence PKKKRKV (SEQ ID NO:1007).

[0279] In certain embodiments, the NLS sequence of the modified Cpf1 protein is positioned at or near the C-terminus of the Cpf1 protein sequence. For example, but not by way of limitation, the modified Cpf1 protein can be selected from the following: His-AsCpf1-nNLS (SEQ ID NO:1000); His-AsCpf1-sNLS (SEQ ID NO:1008) and His-AsCpf1-sNLS-sNLS (SEQ ID NO: 1001), where “His” refers to a six-histidine purification sequence, “AsCpf1” refers to the Acidaminococcus sp. Cpf1 protein sequence, “nNLS” refers to the nucleoplasmin NLS, and “sNLS” refers to the SV40 NLS. Additional permutations of the identity and C-terminal positions of NLS sequences, e.g., appending two or more nNLS sequences or combinations of nNLS and sNLS sequences (or other NLS sequences), as well as sequences with and without purification sequences, e.g., six-histidine sequences, are within the scope of the instantly disclosed subject matter.

[0280] In certain embodiments, the NLS sequence of the modified Cpf1 protein may be positioned at or near the N-terminus of the Cpf1 protein sequence. For example, but not by way of limitation, the modified Cpf1 protein may be selected from the following: His-sNLS-AsCpf1 (SEQ ID NO:1009), His-sNLS-sNLS-AsCpf1 (SEQ ID NO:1010), and sNLS-sNLS-AsCpf1 (SEQ ID NO: 1011). Additional permutations of the identity and N-terminal positions of NLS sequences, e.g., appending two or more nNLS sequences or combinations of nNLS and sNLS sequences (or other NLS sequences), as well as sequences with and without purification sequences, e.g., six-histidine sequences, are within the scope of the instantly disclosed subject matter.

[0281] In certain embodiments, the modified Cpf1 protein may comprise NLS sequences positioned at or near both the N-terminus and C-terminus of the Cpf1 protein sequence. For example, but not by way of limitation, the modified Cpf1 protein may be selected from the following: His-sNLS-AsCpf1-sNLS (SEQ ID NO:1012) and His-sNLS-sNLS-AsCpf1-sNLS-sNLS (SEQ ID NO:1013). Additional permutations of the identity and N-terminal/C-terminal positions of NLS sequences, e.g., appending two or more nNLS sequences or combinations of nNLS and sNLS sequences (or other NLS sequences) to either the N-terminal/C-terminal positions, as well as sequences with and without purification sequences, e.g., six-histidine sequences, are within the scope of the instantly disclosed subject matter.

[0282] In certain embodiments, the modified Cpf1 protein may comprise an alteration (e.g., a deletion or substitution) at one or more cysteine residues of the Cpf1 protein sequence. For example, but not by way of limitation, modified Cpf1 protein may comprise an alteration at a position selected from the group consisting of: C65, C205, C334, C379, C608, C674, C1025, and C1248. In certain embodiments, the modified Cpf1 protein may comprise a substitution of one or more cysteine residues for a serine or alanine. In certain embodiments, the modified Cpf1 protein may comprise an alteration selected from the group consisting of: C65S, C205S, C334S, C379S, C608S, C674S, C1025S, and C1248S. In certain embodiments, the modified Cpf1 protein may comprise an alteration selected from the group consisting of: C65A, C205A, C334A, C379A, C608A, C674A, C1025A, and C1248A. In certain embodiments, the modified Cpf1 protein may comprise alterations at positions C334 and C674 or C334, C379, and C674. In certain embodiments, the modified Cpf1 protein may comprise the following alterations: C334S and C674S, or C334S, C379S, and C674S. In certain embodiments, the modified Cpf1 protein may comprise the following alterations: C334A and C674A, or C334A, C379A, and C674A. In certain embodiments, the modified Cpf1 protein may comprise both one or more cysteine residue alteration as well as the introduction of one or more NLS sequences, e.g., His-AsCpf1-nNLS Cys-less (SEQ ID NO:1014) or His-AsCpf1-nNLS Cys-low (SEQ ID NO:1015). In various embodiments, the Cpf1 protein comprising a deletion or substitution in one or more cysteine residues exhibits reduced aggregation.

[0283] In certain embodiments, other modified Cpf1 proteins known in the art may be used with the methods and systems described herein. For example, in certain embodiments, the modified Cpf1 may be Cpf1 containing the mutation S542R/K548V/N552R (“Cpf1 RVR”). Cpf1 RVR has been shown to cleave target sites with a TATV PAM. In certain embodiments, the modified Cpf1 may be Cpf1 containing the mutation S542R/K607R (“Cpf1 RR”). Cpf1 RR has been shown to cleave target sites with a TYCV/CCCC PAM.

[0284] In some embodiments, a Cpf1 variant is used herein, wherein the Cpf1 variant comprises mutations at one or more residues of AsCpf1 (Acidaminococcus sp. BV3L6) selected from the group consisting of 11, 12, 13, 14, 15, 16, 17, 34, 36, 39, 40, 43, 46, 47, 50, 54, 57, 58, 111, 126, 127, 128, 129, 130, 131, 132, 133, 134, 135, 136, 157, 158, 159, 160, 161, 162, 163, 164, 165, 166, 167, 168, 169, 170, 171, 172, 173, 174, 175, 176, 177, 178, 532, 533, 534, 535, 536, 537, 538, 539, 540, 541, 542, 543, 544, 545, 546, 547, 548, 549, 550, 551, 552, 553, 554, 555, 556, 565, 566, 567, 568, 569, 570, 571, 572, 573, 574, 575, 592, 593, 594, 595, 596, 597, 598, 599, 600, 601, 602, 603, 604, 605, 606, 607, 608, 609, 610, 611, 612, 613, 614, 615, 616, 617, 618, 619, 620, 626, 627, 628, 629, 630, 631, 632, 633, 634, 635, 636, 637, 638, 642, 643, 644, 645, 646, 647, 648, 649, 651, 652, 653, 654, 655, 656, 676, 679, 680, 682, 683, 684, 685, 686, 687, 688, 689, 690, 691, 692, 693, 707, 711, 714, 715, 716, 717, 718, 719, 720, 721, 722, 739, 765, 768, 769, 773, 777, 778, 779, 780, 781, 782, 783, 784, 785, 786, 870, 871, 872, 873, 874, 875, 876, 877, 878, 879, 880, 881, 882, 883, 884, or 1048 or the corresponding position of an AsCpf1 orthologue, homologue, or variant.

[0285] In certain embodiments, a Cpf1 variant as used herein may include any of the Cpf1 proteins described in International Publication Number WO 2017/184768 A1 by Zhang et al. (“'768 Publication”), which is incorporated by reference herein.

[0286] In certain embodiments, a modified Cpf1 protein (also referred to as a Cpf1 variant) used herein may be encoded by any of the sequences set forth in SEQ ID NOs:1000, 1001, 1008-1018, 1032, 1035-39, 1094-1097, 1107-09 (Cpf1 polypeptide sequences) or SEQ ID NOs:1019-1021, 1110-17 (Cpf1 polynucleotide sequences). Table 14 sets forth exemplary Cpf1 variant amino acid and nucleotide sequences. These sequences are set forth in FIG. 40, which details the positions of six-histidine sequences (underlined letters) and NLS sequences (bolded letters). Additional permutations of the identity and N-terminal/C-terminal positions of NLS sequences, e.g., appending two or more nNLS sequences or combinations of nNLS and sNLS sequences (or other NLS sequences) to either the N-terminal/C-terminal positions, as well as sequences with and without purification sequences, e.g., six-histidine sequences, are within the scope of the instantly disclosed subject matter.

[0287] In certain embodiments, any of the Cpf1 proteins or modified Cpf1 proteins disclosed herein may be complexed with one or more gRNA comprising the targeting domain set forth in SEQ ID NOs 1002 and/or 1004 to alter a CCAAT box target region. In certain embodiments, any of the Cpf1 proteins or modified Cpf1 proteins disclosed herein may be complexed with one or more gRNA comprising a sequence set forth in Table 12 or Table 13. In certain embodiments, the modified Cpf1 protein may be His-AsCpf1-nNLS (SEQ ID NO:1000) or His-AsCpf1-sNLS-sNLS (SEQ ID NO:1001). In certain embodiments, a modified Cpf1 protein used herein may be encoded by any of the sequences set forth in SEQ ID NOs:1000, 1001, 1008-1018, 1032, 1035-39, 1094-1097, 1107-09 (Cpf1 polypeptide sequences) or SEQ ID NOs:1019-1021, 1110-17 (Cpf1 polynucleotide sequences). In certain embodiments, the modified Cpf1 protein may comprise the sequence set forth in SEQ ID NO:1097.

[0288] In certain embodiments, the modified Cpf1 protein may include a Cpf1 variant described in Kleinstiver 2019. For example, without limitation, in certain embodiments, the modified Cpf1 protein may be enAsCas12a. In certain embodiments, the modified Cpf1 protein may cleave target sites with a TTTV PAM. In certain embodiments, the modified Cpf1 protein may cleave target sites with a NWYN PAM.

### Modifications of RNA-Guided Nucleases

[0289] The RNA-guided nucleases described above have activities and properties that can be useful in a variety of applications, but the skilled artisan will appreciate that RNA-guided nucleases can also be modified in certain instances, to alter cleavage activity, PAM specificity, or other structural or functional features.

[0290] Turning first to modifications that alter cleavage activity, mutations that reduce or eliminate the activity of domains within the NUC lobe have been described above. Exemplary mutations that may be made in the RuvC domains, in the Cas9 HNH domain, or in the Cpf1 Nuc domain are described in Ran & Hsu 2013 and Yamano 2016, as well as in Cotta-Ramusino. In general, mutations that reduce or eliminate activity in one of the two nuclease domains result in RNA-guided nucleases with nickase activity, but it should be noted that the type of nickase activity varies depending on which domain is inactivated. As one example, inactivation of a RuvC domain of a Cas9 will result in a nickase that cleaves the complementary or top strand as shown below (where C denotes the site of cleavage).

[0291] On the other hand, inactivation of a Cas9 HNH domain results in a nickase that cleaves the bottom or non-complementary strand.

[0292] Modifications of PAM specificity relative to naturally occurring Cas9 reference molecules has been described by Kleinstiver et al. for both S. pyogenes (Kleinstiver 2015a) and S. aureus (Kleinstiver 2015b). Kleinstiver et al. have also described modifications that improve the targeting fidelity of Cas9 (Kleinstiver 2016). Kleinstiver et al. have also described modifications of Cpf1 that provide increased activity and improved targeting ranges (Kleinstiver 2019). Each of these references is incorporated by reference herein.

[0293] RNA-guided nucleases have been split into two or more parts, as described by Zetsche 2015 and Fine 2015 (both incorporated by reference herein).

[0294] RNA-guided nucleases can be, in certain embodiments, size-optimized or truncated, for instance via one or more deletions that reduce the size of the nuclease while still retaining gRNA association, target and PAM recognition, and cleavage activities. In certain embodiments, RNA guided nucleases are bound, covalently or non-covalently, to another polypeptide, nucleotide, or other structure, optionally by means of a linker. Exemplary bound nucleases and linkers are described by Guilinger 2014, incorporated by reference herein for all purposes.

[0295] RNA-guided nucleases also optionally include a tag, such as, but not limited to, a nuclear localization signal to facilitate movement of RNA-guided nuclease protein into the nucleus. In certain embodiments, the RNA-guided nuclease can incorporate C- and/or N-terminal nuclear localization signals. Nuclear localization sequences are known in the art and are described in Maeder and elsewhere.

[0296] The foregoing list of modifications is intended to be exemplary in nature, and the skilled artisan will appreciate, in view of the instant disclosure, that other modifications may be possible or desirable in certain applications. For brevity, therefore, exemplary systems, methods and compositions of the present disclosure are presented with reference to particular RNA-guided nucleases, but it should be understood that the RNA-guided nucleases used may be modified in ways that do not alter their operating principles. Such modifications are within the scope of the present disclosure.

### Nucleic Acids Encoding RNA-Guided Nucleases

[0297] Nucleic acids encoding RNA-guided nucleases, e.g., Cas9, Cpf1 or functional fragments thereof, are provided herein. Exemplary nucleic acids encoding RNA-guided nucleases have been described previously (see, e.g., Cong 2013; Wang 2013; Mali 2013; Jinek 2012).

[0298] In some cases, a nucleic acid encoding an RNA-guided nuclease can be a synthetic nucleic acid sequence. For example, the synthetic nucleic acid molecule can be chemically modified. In certain embodiments, an mRNA encoding an RNA-guided nuclease will have one or more (e.g., all) of the following properties: it can be capped; polyadenylated; and substituted with 5-methylcytidine and/or pseudouridine.

[0299] Synthetic nucleic acid sequences can also be codon optimized, e.g., at least one non-common codon or less-common codon has been replaced by a common codon. For example, the synthetic nucleic acid can direct the synthesis of an optimized messenger mRNA, e.g., optimized for expression in a mammalian expression system, e.g., described herein. Examples of codon optimized Cas9 coding sequences are presented in Cotta-Ramusino.

[0300] In addition, or alternatively, a nucleic acid encoding an RNA-guided nuclease may comprise a nuclear localization sequence (NLS). Nuclear localization sequences are known in the art.

### Functional Analysis of Candidate Molecules

[0301] Candidate RNA-guided nucleases, gRNAs, and complexes thereof, can be evaluated by standard methods known in the art. See, e.g. Cotta-Ramusino. The stability of RNP complexes may be evaluated by differential scanning fluorimetry, as described below.

### Differential Scanning Fluorimetry (DSF)

[0302] The thermostability of ribonucleoprotein (RNP) complexes comprising gRNAs and RNA-guided nucleases can be measured via DSF. The DSF technique measures the thermostability of a protein, which can increase under favorable conditions such as the addition of a binding RNA molecule, e.g., a gRNA.

[0303] A DSF assay can be performed according to any suitable protocol, and can be employed in any suitable setting, including without limitation (a) testing different conditions (e.g. different stoichiometric ratios of gRNA: RNA-guided nuclease protein, different buffer solutions, etc.) to identify optimal conditions for RNP formation; and (b) testing modifications (e.g. chemical modifications, alterations of sequence, etc.) of an RNA-guided nuclease and/or a gRNA to identify those modifications that improve RNP formation or stability. One readout of a DSF assay is a shift in melting temperature of the RNP complex; a relatively high shift suggests that the RNP complex is more stable (and may thus have greater activity or more favorable kinetics of formation, kinetics of degradation, or another functional characteristic) relative to a reference RNP complex characterized by a lower shift. When the DSF assay is deployed as a screening tool, a threshold melting temperature shift may be specified, so that the output is one or more RNPs having a melting temperature shift at or above the threshold. For instance, the threshold can be 5-10° C. (e.g. 5°, 6°, 7°, 8°, 9°, 10°) or more, and the output may be one or more RNPs characterized by a melting temperature shift greater than or equal to the threshold.

[0304] Two non-limiting examples of DSF assay conditions are set forth below:

[0305] To determine the best solution to form RNP complexes, a fixed concentration (e.g. 2 μM) of Cas9 in water+10×SYPRO Orange® (Life Technologies cat #S-6650) is dispensed into a 384 well plate. An equimolar amount of gRNA diluted in solutions with varied pH and salt is then added. After incubating at room temperature for 10′ and brief centrifugation to remove any bubbles, a Bio-Rad CFX384™ Real-Time System C1000 Touch™ Thermal Cycler with the Bio-Rad CFX Manager software is used to run a gradient from 20° C. to 90° C. with a 1° C. increase in temperature every 10 seconds.

[0306] The second assay consists of mixing various concentrations of gRNA with fixed concentration (e.g. 2 μM) Cas9 in optimal buffer from assay 1 above and incubating (e.g. at RT for 10′) in a 384 well plate. An equal volume of optimal buffer+10×SYPRO Orange® (Life Technologies cat #S-6650) is added and the plate sealed with Microseal® B adhesive (MSB-1001). Following brief centrifugation to remove any bubbles, a Bio-Rad CFX384™ Real-Time System C1000 Touch™ Thermal Cycler with the Bio-Rad CFX Manager software is used to run a gradient from 20° C. to 90° C. with a 1° C. increase in temperature every 10 seconds.

### Genome Editing Strategies

[0307] The genome editing systems described above are used, in various embodiments of the present disclosure, to generate edits in (i.e. to alter) targeted regions of DNA within or obtained from a cell. Various strategies are described herein to generate particular edits, and these strategies are generally described in terms of the desired repair outcome, the number and positioning of individual edits (e.g. SSBs or DSBs), and the target sites of such edits.

[0308] Genome editing strategies that involve the formation of SSBs or DSBs are characterized by repair outcomes including: (a) deletion of all or part of a targeted region; (b) insertion into or replacement of all or part of a targeted region; or (c) interruption of all or part of a targeted region. This grouping is not intended to be limiting, or to be binding to any particular theory or model, and is offered solely for economy of presentation. Skilled artisans will appreciate that the listed outcomes are not mutually exclusive and that some repairs may result in other outcomes. The description of a particular editing strategy or method should not be understood to require a particular repair outcome unless otherwise specified.

[0309] Replacement of a targeted region generally involves the replacement of all or part of the existing sequence within the targeted region with a homologous sequence, for instance through gene correction or gene conversion, two repair outcomes that are mediated by HDR pathways. HDR is promoted by the use of a donor template, which can be single-stranded or double stranded, as described in greater detail below. Single or double stranded templates can be exogenous, in which case they will promote gene correction, or they can be endogenous (e.g. a homologous sequence within the cellular genome), to promote gene conversion. Exogenous templates can have asymmetric overhangs (i.e. the portion of the template that is complementary to the site of the DSB may be offset in a 3′ or 5′ direction, rather than being centered within the donor template), for instance as described by Richardson 2016 (incorporated by reference herein). In instances where the template is single stranded, it can correspond to either the complementary (top) or non-complementary (bottom) strand of the targeted region.

[0310] Gene conversion and gene correction are facilitated, in some cases, by the formation of one or more nicks in or around the targeted region, as described in Ran & Hsu 2013 and Cotta-Ramusino. In some cases, a dual-nickase strategy is used to form two offset SSBs that, in turn, form a single DSB having an overhang (e.g. a 5′ overhang).

[0311] Interruption and/or deletion of all or part of a targeted sequence can be achieved by a variety of repair outcomes. As one example, a sequence can be deleted by simultaneously generating two or more DSBs that flank a targeted region, which is then excised when the DSBs are repaired, as is described in Maeder for the LCA10 mutation. As another example, a sequence can be interrupted by a deletion generated by formation of a double strand break with single-stranded overhangs, followed by exonucleolytic processing of the overhangs prior to repair.

[0312] One specific subset of target sequence interruptions is mediated by the formation of an indel within the targeted sequence, where the repair outcome is typically mediated by NHEJ pathways (including Alt-NHEJ). NHEJ is referred to as an “error prone” repair pathway because of its association with indel mutations. In some cases, however, a DSB is repaired by NHEJ without alteration of the sequence around it (a so-called “perfect” or “scarless” repair); this generally requires the two ends of the DSB to be perfectly ligated. Indels, meanwhile, are thought to arise from enzymatic processing of free DNA ends before they are ligated that adds and/or removes nucleotides from either or both strands of either or both free ends.

[0313] Because the enzymatic processing of free DSB ends may be stochastic in nature, indel mutations tend to be variable, occurring along a distribution, and can be influenced by a variety of factors, including the specific target site, the cell type used, the genome editing strategy used, etc. Even so, it is possible to draw limited generalizations about indel formation: deletions formed by repair of a single DSB are most commonly in the 1-50 bp range, but can reach greater than 100-200 bp. Insertions formed by repair of a single DSB tend to be shorter and often include short duplications of the sequence immediately surrounding the break site. However, it is possible to obtain large insertions, and in these cases, the inserted sequence has often been traced to other regions of the genome or to plasmid DNA present in the cells.

[0314] Indel mutations—and genome editing systems configured to produce indels—are useful for interrupting target sequences, for example, when the generation of a specific final sequence is not required and/or where a frameshift mutation would be tolerated. They can also be useful in settings where particular sequences are preferred, insofar as the certain sequences desired tend to occur preferentially from the repair of an SSB or DSB at a given site. Indel mutations are also a useful tool for evaluating or screening the activity of particular genome editing systems and their components. In these and other settings, indels can be characterized by (a) their relative and absolute frequencies in the genomes of cells contacted with genome editing systems and (b) the distribution of numerical differences relative to the unedited sequence, e.g. ±1, ±2, ±3, etc. As one example, in a lead-finding setting, multiple gRNAs can be screened to identify those gRNAs that most efficiently drive cutting at a target site based on an indel readout under controlled conditions. Guides that produce indels at or above a threshold frequency, or that produce a particular distribution of indels, can be selected for further study and development. Indel frequency and distribution can also be useful as a readout for evaluating different genome editing system implementations or formulations and delivery methods, for instance by keeping the gRNA constant and varying certain other reaction conditions or delivery methods.

### Multiplex Strategies

[0315] Genome editing systems according to this disclosure may also be employed for multiplex gene editing to generate two or more DSBs, either in the same locus or in different loci. Any of the RNA-guided nucleases and gRNAs disclosed herein may be used in genome editing systems for multiplex gene editing. Strategies for editing that involve the formation of multiple DSBs, or SSBs, are described in, for instance, Cotta-Ramusino. In certain embodiments, multiple gRNAs and an RNA-guided nuclease may be used in genome editing systems to introduce alterations (e.g., deletions, insertions) into the CCAAT box target region of HBG1 and/or HBG2. In certain embodiments, the RNA-guided nuclease may be a Cpf1 or modified Cpf1.

### Donor Template Design

[0316] Donor template design is described in detail in the literature, for instance in Cotta-Ramusino. DNA oligomer donor templates (oligodeoxynucleotides or ODNs), which can be single stranded (ssODNs) or double-stranded (dsODNs), can be used to facilitate HDR-based repair of DSBs or to boost overall editing rate, and are particularly useful for introducing alterations into a target DNA sequence, inserting a new sequence into the target sequence, or replacing the target sequence altogether.

[0317] Whether single-stranded or double stranded, donor templates generally include regions that are homologous to regions of DNA within or near (e.g. flanking or adjoining) a target sequence to be cleaved. These homologous regions are referred to here as “homology arms,” and are illustrated schematically below:

[5′ homology arm]-[replacement sequence]-[3′ homology arm].

[0318] The homology arms can have any suitable length (including 0 nucleotides if only one homology arm is used), and 3′ and 5′ homology arms can have the same length, or can differ in length. The selection of appropriate homology arm lengths can be influenced by a variety of factors, such as the desire to avoid homologies or microhomologies with certain sequences such as Alu repeats or other very common elements. For example, a 5′ homology arm can be shortened to avoid a sequence repeat element. In other embodiments, a 3′ homology arm can be shortened to avoid a sequence repeat element. In some embodiments, both the 5′ and the 3′ homology arms can be shortened to avoid including certain sequence repeat elements. In addition, some homology arm designs can improve the efficiency of editing or increase the frequency of a desired repair outcome. For example, Richardson 2016, which is incorporated by reference herein, found that the relative asymmetry of 3′ and 5′ homology arms of single stranded donor templates influenced repair rates and/or outcomes.

[0319] Replacement sequences in donor templates have been described elsewhere, including in Cotta-Ramusino. A replacement sequence can be any suitable length (including zero nucleotides, where the desired repair outcome is a deletion), and typically includes one, two, three or more sequence modifications relative to the naturally-occurring sequence within a cell in which editing is desired. One common sequence modification involves the alteration of the naturally-occurring sequence to repair a mutation that is related to a disease or condition of which treatment is desired. Another common sequence modification involves the alteration of one or more sequences that are complementary to, or then, the PAM sequence of the RNA-guided nuclease or the targeting domain of the gRNA(s) being used to generate an SSB or DSB, to reduce or eliminate repeated cleavage of the target site after the replacement sequence has been incorporated into the target site.

[0320] Where a linear ssODN is used, it can be configured to (i) anneal to the nicked strand of the target nucleic acid, (ii) anneal to the intact strand of the target nucleic acid, (iii) anneal to the plus strand of the target nucleic acid, and/or (iv) anneal to the minus strand of the target nucleic acid. An ssODN may have any suitable length, e.g., about, at least, or no more than 80-200 nucleotides (e.g., 80, 90, 100, 110, 120, 130, 140, 150, 160, 170, 180, 190, or 200 nucleotides).

[0321] It should be noted that a template nucleic acid can also be a nucleic acid vector, such as a viral genome or circular double stranded DNA, e.g., a plasmid. Nucleic acid vectors comprising donor templates can include other coding or non-coding elements. For example, a template nucleic acid can be delivered as part of a viral genome (e.g. in an AAV or lentiviral genome) that includes certain genomic backbone elements (e.g. inverted terminal repeats, in the case of an AAV genome) and optionally includes additional sequences coding for a gRNA and/or an RNA-guided nuclease. In certain embodiments, the donor template can be adjacent to, or flanked by, target sites recognized by one or more gRNAs, to facilitate the formation of free DSBs on one or both ends of the donor template that can participate in repair of corresponding SSBs or DSBs formed in cellular DNA using the same gRNAs. Exemplary nucleic acid vectors suitable for use as donor templates are described in Cotta-Ramusino, which is incorporated by reference.

[0322] Whatever format is used, a template nucleic acid can be designed to avoid undesirable sequences. In certain embodiments, one or both homology arms can be shortened to avoid overlap with certain sequence repeat elements, e.g., Alu repeats, LINE elements, etc.

[0323] In certain embodiments, silent, non-pathogenic SNPs may be included in the ssODN donor template to allow for identification of a gene editing event.

[0324] In certain embodiments, a donor template may be a non-specific template that is non-homologous to regions of DNA within or near a target sequence to be cleaved. In certain embodiments, donor templates for use in targeting the GATA1 binding motif in BCL11Ae may include, without limitation, non-target specific templates that are nonhomologous to regions of DNA within or near the GATA1 binding motif in BCL11Ae. In certain embodiments, donor templates for use in targeting the 13 nt target region may include, without limitation, non-target specific templates that are nonhomologous to regions of DNA within or near the 13 nt target region.

[0325] A donor template or template nucleic acid, as that term is used herein, refers to a nucleic acid sequence which can be used in conjunction with an RNA nuclease molecule and one or more gRNA molecules to alter (e.g., delete, disrupt, or modify) a target DNA sequence. In certain embodiments, the template nucleic acid results in an alteration (e.g., deletion) at the CCAAT box target region of HBG1 and/or HBG2. In certain embodiments, the alteration is a non-naturally occurring alteration. In certain embodiments, the non-naturally occurring alteration at the CCAAT box target region of HBG1 and/or HBG2 may comprise the 18 nt target region, the 11 nt target region, the 4 nt target region, or the 1 nt target region, or a combination thereof. In certain embodiments, the alteration is a naturally occurring alteration. In certain embodiments, the naturally occurring alteration at the CCAAT box target region of HBG1 and/or HBG2 may comprise the 13 nt target region, the c.−117 G>A target region, or a combination thereof. In certain embodiments, the template nucleic acid is an ssODN. In certain embodiments, the ssODN is a positive strand or a negative strand.

[0326] For example, a template nucleic acid for introducing the 18 nt deletion at the 18 nt target region (HBG1 c.−104 to −121, HBG2 c.−104 to −121, or a combination thereof) may comprise a 5′ homology arm, a replacement sequence, and a 3′ homology arm, where the replacement sequence is 0 nucleotides or 0 bp. In certain embodiments, the 5′ homology arm may be about 25 to about 200 nucleotides or more in length, e.g., at least about 25, 50, 75, 100, 125, 150, 175, or 200 nucleotides in length. In certain embodiments, the 5′ homology arm comprises about 50 to 100 bp, e.g., 55 to 95, 60 to 90, 70 to 90, or 80 to 90 bp, homology 5′ of the 18 nt target region. In certain embodiments, the 3′ homology arm may be about 25 to about 200 nucleotides or more in length, e.g., at least about 25, 50, 75, 100, 125, 150, 175, or 200 nucleotides in length. In certain embodiments, the 3′ homology arm comprises about 50 to 100 bp, e.g., 55 to 95, 60 to 90, 70 to 90, or 80 to 90 bp, homology 3′ of the 18 nt target region. In certain embodiments, the 5′ and 3′ homology arms are symmetrical in length. In certain embodiments, the 5′ and 3′ homology arms are asymmetrical in length. In certain embodiments, the template nucleic acid is an ssODN. In certain embodiments, the ssODN is a positive strand. In certain embodiments, the ssODN is a negative strand. In certain embodiments, the ssODN comprises, consists essentially of, or consists of SEQ ID NO:974 (OLI16409) or SEQ ID NO:975 (OLI16410).

[0327] In certain embodiments, a template nucleic acid for introducing the 11 nt deletion at the 11 nt target region (HBG1 c.−105 to −115, HBG2 c.−105 to −115, or a combination thereof) may comprise a 5′ homology arm, a replacement sequence, and a 3′ homology arm, where the replacement sequence is 0 nucleotides or 0 bp. In certain embodiments, the 5′ homology arm may be about 25 to about 200 nucleotides in length, e.g., at least about 25, 50, 75, 100, 125, 150, 175, or 200 nucleotides in length. In certain embodiments, the 5′ homology arm comprises about 50 to 100 bp, e.g., 55 to 95, 60 to 90, 70 to 90, or 80 to 90 bp, homology 5′ of the 11 nt target region. In certain embodiments, the 3′ homology arm may be about 25 to about 200 nucleotides in length, e.g., at least about 25, 50, 75, 100, 125, 150, 175, or 200 nucleotides in length. In certain embodiments, the 3′ homology arm comprises about 50 to 100 bp, e.g., 55 to 95, 60 to 90, 70 to 90, or 80 to 90 bp, homology 3′ of the 11 nt target region. In certain embodiments, the 5′ and 3′ homology arms are symmetrical in length. In certain embodiments, the 5′ and 3′ homology arms are asymmetrical in length. In certain embodiments, the template nucleic acid is an ssODN. In certain embodiments, the ssODN is a positive strand. In certain embodiments, the ssODN is a negative strand. In certain embodiments, the ssODN comprises, consists essentially of, or consists of SEQ ID NO:976 (OLI16411) or SEQ ID NO:978 (OLI16413).

[0328] In certain embodiments, a template nucleic acid for introducing the 4 nt deletion at the 4 nt target region (HBG1 c.−112 to −115, HBG2 c.−112 to −115, or a combination thereof) may comprise a 5′ homology arm, a replacement sequence, and a 3′ homology arm, where the replacement sequence is 0 nucleotides or 0 bp. In certain embodiments, the 5′ homology arm may be about 25 to about 200 nucleotides in length, e.g., at least about 25, 50, 75, 100, 125, 150, 175, or 200 nucleotides in length. In certain embodiments, the 5′ homology arm comprises about 50 to 100 bp, e.g., 55 to 95, 60 to 90, 70 to 90, or 80 to 90 bp, homology 5′ of the 4 nt target region. In certain embodiments, the 3′ homology arm may be about 25 to about 200 nucleotides in length, e.g., at least about 25, 50, 75, 100, 125, 150, 175, or 200 nucleotides in length. In certain embodiments, the 3′ homology arm comprises about 50 to 100 bp, e.g., 55 to 95, 60 to 90, 70 to 90, or 80 to 90 bp, homology 3′ of the 4 nt target region. In certain embodiments, the 5′ and 3′ homology arms are symmetrical in length. In certain embodiments, the 5′ and 3′ homology arms are asymmetrical in length. In certain embodiments, the template nucleic acid is an ssODN. In certain embodiments, the ssODN is a positive strand. In certain embodiments, the ssODN is a negative strand. In certain embodiments, the ssODN comprises, consists essentially of, or consists of SEQ ID NO:984 (OLI16419), SEQ ID NO:985 (OLI16420), SEQ ID NO:986 (OLI16421), SEQ ID NO:987 (OLI16422), SEQ ID NO:988 (OLI16423), SEQ ID NO:989 (OLI16424), SEQ ID NO:990 (OLI16425), SEQ ID NO:991 (OLI16426), SEQ ID NO:992 (OLI16427), SEQ ID NO:993 (OLI16428), SEQ ID NO:994 (OLI16429), or SEQ ID NO:995 (OLI16430).

[0329] In certain embodiments, a template nucleic acid for introducing the 1 nt deletion at the 1 nt target region (HBG1 c.−116, HBG2 c.−116, or a combination thereof) may comprise a 5′ homology arm, a replacement sequence, and a 3′ homology arm, where the replacement sequence is 0 nucleotides or 0 bp. In certain embodiments, the 5′ homology arm may be about 25 to about 200 nucleotides in length, e.g., at least about 25, 50, 75, 100, 125, 150, 175, or 200 nucleotides in length. In certain embodiments, the 5′ homology arm comprises about 50 to 100 bp, e.g., 55 to 95, 60 to 90, 70 to 90, or 80 to 90 bp, homology 5′ of the 1 nt target region. In certain embodiments, the 3′ homology arm may be about 25 to about 200 nucleotides in length, e.g., at least about 25, 50, 75, 100, 125, 150, 175, or 200 nucleotides in length. In certain embodiments, the 3′ homology arm comprises about 50 to 100 bp, e.g., 55 to 95, 60 to 90, 70 to 90, or 80 to 90 bp, homology 3′ of the 1 nt target region. In certain embodiments, the 5′ and 3′ homology arms are symmetrical in length. In certain embodiments, the 5′ and 3′ homology arms are asymmetrical in length. In certain embodiments, the template nucleic acid is an ssODN. In certain embodiments, the ssODN is a positive strand. In certain embodiments, the ssODN is a negative strand. In certain embodiments, the ssODN comprises, consists essentially of, or consists of SEQ ID NO:982 (OLI16417) or SEQ ID NO:983 (OLI16418).

[0330] In certain embodiments, the alteration at the CCAAT box target region recapitulates or is similar to a naturally occurring alteration, such as a 13 nt deletion. In certain embodiments, a template nucleic acid for introducing the 13 nt deletion at the 13 nt target region (HBG1 c.−116, HBG2 c.−116, or a combination thereof) may comprise a 5′ homology arm, a replacement sequence, and a 3′ homology arm, where the replacement sequence is 0 nucleotides or 0 bp. In certain embodiments, the 5′ homology arm may be about 25 to about 200 nucleotides in length, e.g., at least about 25, 50, 75, 100, 125, 150, 175, or 200 nucleotides in length. In certain embodiments, the 5′ homology arm comprises about 50 to 100 bp, e.g., 55 to 95, 60 to 90, 70 to 90, or 80 to 90 bp, homology 5′ of the 13 nt target region. In certain embodiments, the 3′ homology arm may be about 25 to about 200 nucleotides in length, e.g., at least about 25, 50, 75, 100, 125, 150, 175, or 200 nucleotides in length. In certain embodiments, the 3′ homology arm comprises about 50 to 100 bp, e.g., 55 to 95, 60 to 90, 70 to 90, or 80 to 90 bp, homology 3′ of the 13 nt target region. In certain embodiments, the 5′ and 3′ homology arms are symmetrical in length. In certain embodiments, the 5′ and 3′ homology arms are asymmetrical in length. In certain embodiments, the template nucleic acid is an ssODN. In certain embodiments, the ssODN is a positive strand. In certain embodiments, the ssODN is a negative strand. In certain embodiments, the ssODN comprises, consists essentially of, or consists of SEQ ID NO:979 (OLI16414) or SEQ ID NO:977 (OLI16412).

[0331] In certain embodiments, the alteration at the CCAAT box target region recapitulates or is similar to a naturally occurring alteration, such as a substitution from G to A at the −117G>A target region. In certain embodiments, a template nucleic acid for introducing the −117G>A substitution at the −117G>A target region (HBG1 c.−117 G>A, HBG2 c.−117 G>A, or a combination thereof) may comprise a 5′ homology arm, a replacement sequence, and a 3′ homology arm, where the replacement sequence is 0 nucleotides or 0 bp. In certain embodiments, the 5′ homology arm may be about 100 to about 200 nucleotides in length, e.g., at least about 100, 125, 150, 175, or 200 nucleotides in length. In certain embodiments, the 5′ homology arm comprises about 50 to 100 bp, e.g., 55 to 95, 60 to 90, 70 to 90, or 80 to 90 bp, homology 5′ of the −117G>A target region. In certain embodiments, the 3′ homology arm may be about 25 to about 200 nucleotides in length, e.g., at least about 25, 50, 75, 100, 125, 150, 175, or 200 nucleotides in length. In certain embodiments, the 3′ homology arm comprises about 50 to 100 bp, e.g., 55 to 95, 60 to 90, 70 to 90, or 80 to 90 bp, homology 3′ of the −117G>A target region. In certain embodiments, the 5′ and 3′ homology arms are symmetrical in length. In certain embodiments, the 5′ and 3′ homology arms are asymmetrical in length. In certain embodiments, the template nucleic acid is an ssODN. In certain embodiments, the ssODN is a positive strand. In certain embodiments, the ssODN is a negative strand. In certain embodiments, the ssODN comprises, consists essentially of, or consists of SEQ ID NO:980 (OLI16415) or SEQ ID NO:981 (OLI16416).

[0332] In certain embodiments, the 5′ homology arm comprises a 5′ phosphorothioate (PhTx) modification. In certain embodiments, the 3′ homology arm comprises a 3′ PhTx modification. In certain embodiments, the template nucleic acid comprises a 5′ and 3′ PhTx modification.

[0333] In certain embodiments, the ssODNs for introducing alterations (e.g., deletions) at the CCAAT box target region may be used in conjunction with an RNA nuclease and one or more gRNAs that target the CCAAT target region, for example, the gRNAs disclosed in Table 6, Table 12, Table 13.

### Target Cells

[0334] Genome editing systems according to this disclosure can be used to manipulate or alter a cell, e.g., to edit or alter a target nucleic acid. The manipulating can occur, in various embodiments, in vivo or ex vivo.

[0335] A variety of cell types can be manipulated or altered according to the embodiments of this disclosure, and in some cases, such as in vivo applications, a plurality of cell types are altered or manipulated, for example by delivering genome editing systems according to this disclosure to a plurality of cell types. In other cases, however, it may be desirable to limit manipulation or alteration to a particular cell type or types. For instance, it can be desirable in some instances to edit a cell with limited differentiation potential or a terminally differentiated cell, such as a photoreceptor cell in the case of Maeder, in which modification of a genotype is expected to result in a change in cell phenotype. In other cases, however, it may be desirable to edit a less differentiated, multipotent or pluripotent, stem or progenitor cell. By way of example, the cell may be an embryonic stem cell, induced pluripotent stem cell (iPSC), hematopoietic stem/progenitor cell (HSPC), or other stem or progenitor cell type that differentiates into a cell type of relevance to a given application or indication.

[0336] As a corollary, the cell being altered or manipulated is, variously, a dividing cell or a non-dividing cell, depending on the cell type(s) being targeted and/or the desired editing outcome.

[0337] When cells are manipulated or altered ex vivo, the cells can be used (e.g. administered to a subject) immediately, or they can be maintained or stored for later use. Those of skill in the art will appreciate that cells can be maintained in culture or stored (e.g. frozen in liquid nitrogen) using any suitable method known in the art.

### Implementation of Genome Editing Systems: Delivery, Formulations, and Routes of Administration

[0338] As discussed above, the genome editing systems of this disclosure can be implemented in any suitable manner, meaning that the components of such systems, including without limitation the RNA-guided nuclease, gRNA, and optional donor template nucleic acid, can be delivered, formulated, or administered in any suitable form or combination of forms that results in the transduction, expression or introduction of a genome editing system and/or causes a desired repair outcome in a cell, tissue or subject. Tables 2 and 3 set forth several, non-limiting examples of genome editing system implementations. Those of skill in the art will appreciate, however, that these listings are not comprehensive, and that other implementations are possible. With reference to Table 2 in particular, the table lists several exemplary implementations of a genome editing system comprising a single gRNA and an optional donor template. However, genome editing systems according to this disclosure can incorporate multiple gRNAs, multiple RNA-guided nucleases, and other components such as proteins, and a variety of implementations will be evident to the skilled artisan based on the principles illustrated in the table. In the table, [N/A] indicates that the genome editing system does not include the indicated component.

TABLE 2
Genome Editing System Components

| RNA-guided | | Donor | |
|---|---|---|---|
| Nuclease | gRNA | Template | Comments |
| Protein | RNA | [N/A] | An RNA-guided nuclease protein |
| | | | complexed with a gRNA molecule |
| | | | (an RNP complex) |
| Protein | RNA | DNA | An RNP complex as described above |
| | | | plus a single-stranded or double |
| | | | stranded donor template. |
| Protein | DNA | [N/A] | An RNA-guided nuclease protein |
| | | | plus gRNA transcribed from DNA. |
| Protein | DNA | DNA | An RNA-guided nuclease protein |
| | | | plus gRNA-encoding DNA and a |
| | | | separate DNA donor template. |
| Protein | DNA | | An RNA-guided nuclease protein and |
| | | | a single DNA encoding both a gRNA |
| | | | and a donor template. |
| DNA | | | A DNA or DNA vector encoding an |
| | | | RNA-guided nuclease, a gRNA and a |
| | | | donor template. |
| DNA | DNA | [N/A] | Two separate DNAs, or two separate |
| | | | DNA vectors, encoding the RNA- |
| | | | guided nuclease and the gRNA, |
| | | | respectively. |
| DNA | DNA | DNA | Three separate DNAs, or three |
| | | | separate DNA vectors, encoding the |
| | | | RNA-guided nuclease, the gRNA and |
| | | | the donor template, respectively. |
| DNA | | [N/A] | A DNA or DNA vector encoding an |
| | | | RNA-guided nuclease and a gRNA |
| DNA | | DNA | A first DNA or DNA vector encoding |
| | | | an RNA-guided nuclease and a |
| | | | gRNA, and a second DNA or DNA |
| | | | vector encoding a donor template. |
| DNA | DNA | | A first DNA or DNA vector encoding |
| | | | an RNA-guided nuclease and second |
| | | | DNA or DNA vector encoding a |
| | | | gRNA and a donor template. |
| DNA | | | A first DNA or DNA vector encoding |
| | DNA | | an RNA-guided nuclease and a donor |
| | | | template, and a second DNA or DNA |
| | | | vector encoding a gRNA |
| DNA | | | A DNA or DNA vector encoding an |
| | RNA | | RNA-guided nuclease and a donor |
| | | | template, and a gRNA |

| RNA | [N/A] | An RNA or RNA vector encoding an |
|---|---|---|
| | | RNA-guided nuclease and comprising |
| | | a gRNA |
| RNA | DNA | An RNA or RNA vector encoding an |

RNA-guided nuclease and comprising
a gRNA, and a DNA or DNA vector
encoding a donor template.

[0339] Table 3 summarizes various delivery methods for the components of genome editing systems, as described herein. Again, the listing is intended to be exemplary rather than limiting.

TABLE 3

| | | Delivery into | | | Type of |
|---|---|---|---|---|---|
| | | Non-Dividing | Duration of | Genome | Molecule |
| Delivery Vector/Mode | | Cells | Expression | Integration | Delivered |
| Physical (e.g., electroporation, | | YES | Transient | NO | Nucleic Acids |
| particle gun, Calcium | | | | | and Proteins |
| Phosphate transfection, cell | | | | | |
| compression or squeezing) | | | | | |
| Viral | Retrovirus | NO | Stable | YES | RNA |
| | Lentivirus | YES | Stable | YES/NO with | RNA |
| | | | | modifications | |
| | Adenovirus | YES | Transient | NO | DNA |
| | Adeno- | YES | Stable | NO | DNA |
| | Associated Virus | | | | |
| | (AAV) | | | | |
| | Vaccinia Virus | YES | Very | NO | DNA |
| | | | Transient | | |
| | Herpes Simplex | YES | Stable | NO | DNA |
| | Virus | | | | |
| Non-Viral | Cationic | YES | Transient | Depends on | Nucleic Acids |
| | Liposomes | | | what is | and Proteins |
| | | | | delivered | |
| | Polymeric | YES | Transient | Depends on | Nucleic Acids |
| | Nanoparticles | | | what is | and Proteins |
| | | | | delivered | |
| Biological | Attenuated | YES | Transient | NO | Nucleic Acids |
| Non-Viral | Bacteria | | | | |
| Delivery | Engineered | YES | Transient | NO | Nucleic Acids |
| Vehicles | Bacteriophages | | | | |
| | Mammalian | YES | Transient | NO | Nucleic Acids |
| | Virus-like | | | | |
| | Particles | | | | |
| | Biological | YES | Transient | NO | Nucleic Acids |
| | liposomes: | | | | |
| | Erythrocyte | | | | |
| | Ghosts and | | | | |
| | Exosomes | | | | |

### Nucleic Acid-Based Delivery of Genome Editing Systems

[0340] Nucleic acids encoding the various elements of a genome editing system according to the present disclosure can be administered to subjects or delivered into cells by art-known methods or as described herein. For example, RNA-guided nuclease-encoding and/or gRNA-encoding DNA, as well as donor template nucleic acids can be delivered by, e.g., vectors (e.g., viral or non-viral vectors), non-vector based methods (e.g., using naked DNA or DNA complexes), or a combination thereof.

[0341] Nucleic acids encoding genome editing systems or components thereof can be delivered directly to cells as naked DNA or RNA, for instance by means of transfection or electroporation, or can be conjugated to molecules (e.g., N-acetylgalactosamine) promoting uptake by the target cells (e.g., erythrocytes, HSCs). Nucleic acid vectors, such as the vectors summarized in Table 3, can also be used.

[0342] Nucleic acid vectors can comprise one or more sequences encoding genome editing system components, such as an RNA-guided nuclease, a gRNA and/or a donor template. A vector can also comprise a sequence encoding a signal peptide (e.g., for nuclear localization, nucleolar localization, or mitochondrial localization), associated with (e.g., inserted into or fused to) a sequence coding for a protein. As one example, a nucleic acid vectors can include a Cas9 coding sequence that includes one or more nuclear localization sequences (e.g., a nuclear localization sequence from SV40).

[0343] The nucleic acid vector can also include any suitable number of regulatory/control elements, e.g., promoters, enhancers, introns, polyadenylation signals, Kozak consensus sequences, or internal ribosome entry sites (IRES). These elements are well known in the art, and are described in Cotta-Ramusino.

[0344] Nucleic acid vectors according to this disclosure include recombinant viral vectors. Exemplary viral vectors are set forth in Table 3, and additional suitable viral vectors and their use and production are described in Cotta-Ramusino. Other viral vectors known in the art can also be used. In addition, viral particles can be used to deliver genome editing system components in nucleic acid and/or peptide form. For example, “empty” viral particles can be assembled to contain any suitable cargo. Viral vectors and viral particles can also be engineered to incorporate targeting ligands to alter target tissue specificity.

[0345] In addition to viral vectors, non-viral vectors can be used to deliver nucleic acids encoding genome editing systems according to the present disclosure. One important category of non-viral nucleic acid vectors are nanoparticles, which can be organic or inorganic. Nanoparticles are well known in the art, and are summarized in Cotta-Ramusino. Any suitable nanoparticle design can be used to deliver genome editing system components or nucleic acids encoding such components. For instance, organic (e.g. lipid and/or polymer) nonparticles can be suitable for use as delivery vehicles in certain embodiments of this disclosure. Exemplary lipids for use in nanoparticle formulations, and/or gene transfer are shown in Table 4 and Table 5 lists exemplary polymers for use in gene transfer and/or nanoparticle formulations.

TABLE 4
Lipids Used for Gene Transfer

| Lipid | Abbreviation | Feature |
|---|---|---|
| 1,2-Dioleoyl-sn-glycero-3-phosphatidylcholine | DOPC | Helper |
| 1,2-Dioleoyl-sn-glycero-3-phosphatidylethanolamine | DOPE | Helper |
| Cholesterol | | Helper |
| N-[1-(2,3-Dioleyloxy)propyl]N,N,N-trimethylammonium chloride | DOTMA | Cationic |
| 1,2-Dioleoyloxy-3-trimethylammonium-propane | DOTAP | Cationic |
| Dioctadecylamidoglycylspermine | DOGS | Cationic |
| N-(3-Aminopropyl)-N,N-dimethyl-2,3-bis(dodecyloxy)-1- | GAP-DLRIE | Cationic |
| propanaminium bromide | | |
| Cetyltrimethylammonium bromide | CTAB | Cationic |
| 6-Lauroxyhexyl ornithinate | LHON | Cationic |
| 1-(2,3-Dioleoyloxypropyl)-2,4,6-trimethylpyridinium | 2Oc | Cationic |
| 2,3-Dioleyloxy-N-[2(sperminecarboxamido-ethyl]-N,N-dimethyl-1- | DOSPA | Cationic |
| propanaminium trifluoroacetate | | |
| 1,2-Dioleyl-3-trimethylammonium-propane | DOPA | Cationic |
| N-(2-Hydroxyethyl)-N,N-dimethyl-2,3-bis(tetradecyloxy)-1- | MDRIE | Cationic |
| propanaminium bromide | | |
| Dimyristooxypropyl dimethyl hydroxyethyl ammonium bromide | DMRI | Cationic |
| 3β-[N-(N′,N′-Dimethylaminoethane)-carbamoyl]cholesterol | DC-Chol | Cationic |
| Bis-guanidium-tren-cholesterol | BGTC | Cationic |
| 1,3-Diodeoxy-2-(6-carboxy-spermyl)-propylamide | DOSPER | Cationic |
| Dimethyloctadecylammonium bromide | DDAB | Cationic |
| Dioctadecylamidoglicylspermidin | DSL | Cationic |
| rac-[(2,3-Dioctadecyloxypropyl)(2-hydroxyethyl)]-dimethylammonium | CLIP-1 | Cationic |
| chloride | | |
| rac-[2(2,3-Dihexadecyloxypropyl- | CLIP-6 | Cationic |
| oxymethyloxy)ethyl]trimethylammonium bromide | | |
| Ethyldimyristoylphosphatidylcholine | EDMPC | Cationic |
| 1,2-Distearyloxy-N,N-dimethyl-3-aminopropane | DSDMA | Cationic |
| 1,2-Dimyristoyl-trimethylammonium propane | DMTAP | Cationic |
| O,O′-Dimyristyl-N-lysyl aspartate | DMKE | Cationic |
| 1,2-Distearoyl-sn-glycero-3-ethylphosphocholine | DSEPC | Cationic |
| N-Palmitoyl D-erythro-sphingosyl carbamoyl-spermine | CCS | Cationic |
| N-t-Butyl-N0-tetradecyl-3-tetradecylaminopropionamidine | diC14-amidine | Cationic |
| Octadecenolyoxy[ethyl-2-heptadeceny1-3 hydroxyethyl] imidazolinium | DOTIM | Cationic |
| chloride | | |
| N1-Cholesteryloxycarbonyl-3,7-diazanonane-1,9-diamine | CDAN | Cationic |
| 2-(3-[Bis(3-amino-propyl)-amino]propylamino)-N- | RPR209120 | Cationic |
| ditetradecylcarbamoylme-ethyl-acetamide | | |
| 1,2-dilinoleyloxy-3-dimethylaminopropane | DLinDMA | Cationic |
| 2,2-dilinoleyl-4-dimethylaminoethyl-[1,3]-dioxolane | DLin-KC2-DMA | Cationic |
| dilinoleyl-methyl-4-dimethylaminobutyrate | DLin-MC3-DMA | Cationic |

TABLE 5
Polymers Used for Gene Transfer

| Polymer | Abbreviation |
|---|---|
| Poly(ethylene)glycol | PEG |
| Polyethylenimine | PEI |
| Dithiobis(succinimidylpropionate) | DSP |
| Dimethyl-3,3′-dithiobispropionimidate | DTBP |
| Poly(ethylene imine) biscarbamate | PEIC |
| Poly(L-lysine) | PLL |
| Histidine modified PLL | |
| Poly(N-vinylpyrrolidone) | PVP |
| Poly(propylenimine) | PPI |
| Poly(amidoamine) | PAMAM |
| Poly(amido ethylenimine) | SS-PAEI |
| Triethylenetetramine | TETA |
| Poly(β-aminoester) | |
| Poly(4-hydroxy-L-proline ester) | PHP |
| Poly(allylamine) | |
| Poly(α-[4-aminobutyl]-L-glycolic acid) | PAGA |
| Poly(D,L-lactic-co-glycolic acid) | PLGA |
| Poly(N-ethyl-4-vinylpyridinium bromide) | |
| Poly(phosphazene)s | PPZ |
| Poly(phosphoester)s | PPE |
| Poly(phosphoramidate)s | PPA |
| Poly(N-2-hydroxypropylmethacrylamide) | pHPMA |
| Poly (2-(dimethylamino)ethyl methacrylate) | pDMAEMA |
| Poly(2-aminoethyl propylene phosphate) | PPE-EA |
| Chitosan | |
| Galactosylated chitosan | |
| N-Dodacylated chitosan | |
| Histone | |
| Collagen | |
| Dextran-spermine | D-SPM |

[0346] Non-viral vectors optionally include targeting modifications to improve uptake and/or selectively target certain cell types. These targeting modifications can include e.g., cell specific antigens, monoclonal antibodies, single chain antibodies, aptamers, polymers, sugars (e.g., N-acetylgalactosamine (GalNAc)), and cell penetrating peptides. Such vectors also optionally use fusogenic and endosome-destabilizing peptides/polymers, undergo acid-triggered conformational changes (e.g., to accelerate endosomal escape of the cargo), and/or incorporate a stimuli-cleavable polymer, e.g., for release in a cellular compartment. For example, disulfide-based cationic polymers that are cleaved in the reducing cellular environment can be used.

[0347] In certain embodiments, one or more nucleic acid molecules (e.g., DNA molecules) other than the components of a genome editing system, e.g., the RNA-guided nuclease component and/or the gRNA component described herein, are delivered. In certain embodiments, the nucleic acid molecule is delivered at the same time as one or more of the components of the Genome editing system. In certain embodiments, the nucleic acid molecule is delivered before or after (e.g., less than about 30 minutes, 1 hour, 2 hours, 3 hours, 6 hours, 9 hours, 12 hours, 1 day, 2 days, 3 days, 1 week, 2 weeks, or 4 weeks) one or more of the components of the Genome editing system are delivered. In certain embodiments, the nucleic acid molecule is delivered by a different means than one or more of the components of the genome editing system, e.g., the RNA-guided nuclease component and/or the gRNA component, are delivered. The nucleic acid molecule can be delivered by any of the delivery methods described herein. For example, the nucleic acid molecule can be delivered by a viral vector, e.g., an integration-deficient lentivirus, and the RNA-guided nuclease molecule component and/or the gRNA component can be delivered by electroporation, e.g., such that the toxicity caused by nucleic acids (e.g., DNAs) can be reduced. In certain embodiments, the nucleic acid molecule encodes a therapeutic protein, e.g., a protein described herein. In certain embodiments, the nucleic acid molecule encodes an RNA molecule, e.g., an RNA molecule described herein.

Delivery of RNPs and/or RNA Encoding Genome Editing System Components

[0348] RNPs (complexes of gRNAs and RNA-guided nucleases) and/or RNAs encoding RNA-guided nucleases and/or gRNAs, can be delivered into cells or administered to subjects by art-known methods, some of which are described in Cotta-Ramusino. In vitro, RNA-guided nuclease-encoding and/or gRNA-encoding RNA can be delivered, e.g., by microinjection, electroporation, transient cell compression or squeezing (see, e.g., Lee 2012). Lipid-mediated transfection, peptide-mediated delivery, GalNAc- or other conjugate-mediated delivery, and combinations thereof, can also be used for delivery in vitro and in vivo. A protective, interactive, non-condensing (PINC) system may be used for delivery.

[0349] In vitro delivery via electroporation comprises mixing the cells with the RNA encoding RNA-guided nucleases and/or gRNAs, with or without donor template nucleic acid molecules, in a cartridge, chamber or cuvette and applying one or more electrical impulses of defined duration and amplitude. Systems and protocols for electroporation are known in the art, and any suitable electroporation tool and/or protocol can be used in connection with the various embodiments of this disclosure.

### Route of Administration

[0350] Genome editing systems, or cells altered or manipulated using such systems, can be administered to subjects by any suitable mode or route, whether local or systemic. Systemic modes of administration include oral and parenteral routes. Parenteral routes include, by way of example, intravenous, intramarrow, intrarterial, intramuscular, intradermal, subcutaneous, intranasal, and intraperitoneal routes. Components administered systemically can be modified or formulated to target, e.g., HSCs, hematopoietic stem/progenitor cells, or erythroid progenitors or precursor cells.

[0351] Local modes of administration include, by way of example, intramarrow injection into the trabecular bone or intrafemoral injection into the marrow space, and infusion into the portal vein. In certain embodiments, significantly smaller amounts of the components (compared with systemic approaches) can exert an effect when administered locally (for example, directly into the bone marrow) compared to when administered systemically (for example, intravenously). Local modes of administration can reduce or eliminate the incidence of potentially toxic side effects that may occur when therapeutically effective amounts of a component are administered systemically.

[0352] Administration can be provided as a periodic bolus (for example, intravenously) or as continuous infusion from an internal reservoir or from an external reservoir (for example, from an intravenous bag or implantable pump). Components can be administered locally, for example, by continuous release from a sustained release drug delivery device.

[0353] In addition, components can be formulated to permit release over a prolonged period of time. A release system can include a matrix of a biodegradable material or a material which releases the incorporated components by diffusion. The components can be homogeneously or heterogeneously distributed within the release system. A variety of release systems can be useful, however, the choice of the appropriate system will depend upon rate of release required by a particular application. Both non-degradable and degradable release systems can be used. Suitable release systems include polymers and polymeric matrices, non-polymeric matrices, or inorganic and organic excipients and diluents such as, but not limited to, calcium carbonate and sugar (for example, trehalose). Release systems may be natural or synthetic. However, synthetic release systems are preferred because generally they are more reliable, more reproducible and produce more defined release profiles. The release system material can be selected so that components having different molecular weights are released by diffusion through or degradation of the material.

[0354] Representative synthetic, biodegradable polymers include, for example: polyamides such as poly(amino acids) and poly(peptides); polyesters such as poly(lactic acid), poly(glycolic acid), poly(lactic-co-glycolic acid), and poly(caprolactone); poly(anhydrides); polyorthoesters; polycarbonates; and chemical derivatives thereof (substitutions, additions of chemical groups, for example, alkyl, alkylene, hydroxylations, oxidations, and other modifications routinely made by those skilled in the art), copolymers and mixtures thereof. Representative synthetic, non-degradable polymers include, for example: polyethers such as poly(ethylene oxide), poly(ethylene glycol), and poly(tetramethylene oxide); vinyl polymers-polyacrylates and polymethacrylates such as methyl, ethyl, other alkyl, hydroxyethyl methacrylate, acrylic and methacrylic acids, and others such as poly(vinyl alcohol), poly(vinyl pyrolidone), and poly(vinyl acetate); poly(urethanes); cellulose and its derivatives such as alkyl, hydroxyalkyl, ethers, esters, nitrocellulose, and various cellulose acetates; polysiloxanes; and any chemical derivatives thereof (substitutions, additions of chemical groups, for example, alkyl, alkylene, hydroxylations, oxidations, and other modifications routinely made by those skilled in the art), copolymers and mixtures thereof.

[0355] Poly(lactide-co-glycolide) microsphere can also be used. Typically the microspheres are composed of a polymer of lactic acid and glycolic acid, which are structured to form hollow spheres. The spheres can be approximately 15-30 microns in diameter and can be loaded with components described herein. In some embodiments, genome editing systems, system components and/or nucleic acids encoding system components, are delivered with a block copolymer such as a poloxamer or a poloxamine.

### Multi-Modal or Differential Delivery of Components

[0356] Skilled artisans will appreciate, in view of the instant disclosure, that different components of genome editing systems disclosed herein can be delivered together or separately and simultaneously or non-simultaneously. Separate and/or asynchronous delivery of genome editing system components can be particularly desirable to provide temporal or spatial control over the function of genome editing systems and to limit certain effects caused by their activity.

[0357] Different or differential modes as used herein refer to modes of delivery that confer different pharmacodynamic or pharmacokinetic properties on the subject component molecule, e.g., a RNA-guided nuclease molecule, gRNA, template nucleic acid, or payload. For example, the modes of delivery can result in different tissue distribution, different half-life, or different temporal distribution, e.g., in a selected compartment, tissue, or organ.

[0358] Some modes of delivery, e.g., delivery by a nucleic acid vector that persists in a cell, or in progeny of a cell, e.g., by autonomous replication or insertion into cellular nucleic acid, result in more persistent expression of and presence of a component. Examples include viral, e.g., AAV or lentivirus, delivery.

[0359] By way of example, the components of a genome editing system, e.g., a RNA-guided nuclease and a gRNA, can be delivered by modes that differ in terms of resulting half-life or persistent of the delivered component the body, or in a particular compartment, tissue or organ. In certain embodiments, a gRNA can be delivered by such modes. The RNA-guided nuclease molecule component can be delivered by a mode which results in less persistence or less exposure to the body or a particular compartment or tissue or organ.

[0360] More generally, in certain embodiments, a first mode of delivery is used to deliver a first component and a second mode of delivery is used to deliver a second component. The first mode of delivery confers a first pharmacodynamic or pharmacokinetic property. The first pharmacodynamic property can be, e.g., distribution, persistence, or exposure, of the component, or of a nucleic acid that encodes the component, in the body, a compartment, tissue or organ. The second mode of delivery confers a second pharmacodynamic or pharmacokinetic property. The second pharmacodynamic property can be, e.g., distribution, persistence, or exposure, of the component, or of a nucleic acid that encodes the component, in the body, a compartment, tissue or organ.

[0361] In certain embodiments, the first pharmacodynamic or pharmacokinetic property, e.g., distribution, persistence or exposure, is more limited than the second pharmacodynamic or pharmacokinetic property.

[0362] In certain embodiments, the first mode of delivery is selected to optimize, e.g., minimize, a pharmacodynamic or pharmacokinetic property, e.g., distribution, persistence or exposure.

[0363] In certain embodiments, the second mode of delivery is selected to optimize, e.g., maximize, a pharmacodynamic or pharmacokinetic property, e.g., distribution, persistence or exposure.

[0364] In certain embodiments, the first mode of delivery comprises the use of a relatively persistent element, e.g., a nucleic acid, e.g., a plasmid or viral vector, e.g., an AAV or lentivirus. As such vectors are relatively persistent product transcribed from them would be relatively persistent.

[0365] In certain embodiments, the second mode of delivery comprises a relatively transient element, e.g., an RNA or protein.

[0366] In certain embodiments, the first component comprises gRNA, and the delivery mode is relatively persistent, e.g., the gRNA is transcribed from a plasmid or viral vector, e.g., an AAV or lentivirus. Transcription of these genes would be of little physiological consequence because the genes do not encode for a protein product, and the gRNAs are incapable of acting in isolation. The second component, a RNA-guided nuclease molecule, is delivered in a transient manner, for example as mRNA or as protein, ensuring that the full RNA-guided nuclease molecule/gRNA complex is only present and active for a short period of time.

[0367] Furthermore, the components can be delivered in different molecular form or with different delivery vectors that complement one another to enhance safety and tissue specificity.

[0368] Use of differential delivery modes can enhance performance, safety, and/or efficacy, e.g., the likelihood of an eventual off-target modification can be reduced. Delivery of immunogenic components, e.g., Cas9 molecules, by less persistent modes can reduce immunogenicity, as peptides from the bacterially-derived Cas enzyme are displayed on the surface of the cell by MHC molecules. A two-part delivery system can alleviate these drawbacks.

[0369] Differential delivery modes can be used to deliver components to different, but overlapping target regions. The formation active complex is minimized outside the overlap of the target regions. Thus, in certain embodiments, a first component, e.g., a gRNA is delivered by a first delivery mode that results in a first spatial, e.g., tissue, distribution. A second component, e.g., a RNA-guided nuclease molecule is delivered by a second delivery mode that results in a second spatial, e.g., tissue, distribution. In certain embodiments, the first mode comprises a first element selected from a liposome, nanoparticle, e.g., polymeric nanoparticle, and a nucleic acid, e.g., viral vector. The second mode comprises a second element selected from the group. In certain embodiments, the first mode of delivery comprises a first targeting element, e.g., a cell specific receptor or an antibody, and the second mode of delivery does not include that element. In certain embodiments, the second mode of delivery comprises a second targeting element, e.g., a second cell specific receptor or second antibody.

[0370] When the RNA-guided nuclease molecule is delivered in a virus delivery vector, a liposome, or polymeric nanoparticle, there is the potential for delivery to and therapeutic activity in multiple tissues, when it may be desirable to only target a single tissue. A two-part delivery system can resolve this challenge and enhance tissue specificity. If the gRNA and the RNA-guided nuclease molecule are packaged in separated delivery vehicles with distinct but overlapping tissue tropism, the fully functional complex is only be formed in the tissue that is targeted by both vectors.

### EXAMPLES

[0371] The principles and embodiments described above are further illustrated by the non-limiting examples that follow:

### Example 1: Cpf1 RNP Containing gRNA Targeting the CCAAT Box Supports Gene Editing in Human Hematopoietic Stem/Progenitor Cells

[0372] A Cpf1 guide RNA, HBG1-1 (i.e., OLI13620 (Table 6)), was designed to target the HBG distal CCAAT box. To determine optimal nuclear localization signal configuration for Acidaminococcus sp. Cpf1 (“AsCpf1”) delivery in CD34+ cells, HBG1-1 gRNA was complexed to two nuclear localization signal (NLS) variants of AsCpf1, namely His-AsCpf1-nNLS (SEQ ID NO: 1000) and His-AsCpf1-sNLS-sNLS (SEQ ID NO:1001). “His” refers to a six-histidine purification sequence, “AsCpf1” refers to the Acidaminococcus sp. Cpf1 protein sequence, “nNLS” refers to the nucleoplasmin NLS, and “sNLS” refers to the SV40 NLS.

[0373] Briefly, mPB CD34+ cells were pre-stimulated for 2 days with human cytokines in X-Vivo-10 and then electroporated with the RNPs at 5 μM or 20 μM. The genomic DNA was extracted three days post electroporation and next-generation sequencing was performed on the HBG PCR products. HBG1-1 gRNA complexed to either of the Cpf1 NLS variants tested (“His-AsCpf1-sNLS-sNLS_HBG1-1 RNP” or “His-AsCpf1-nNLS_HBG1-1 RNP”), supported editing of CD34+ cells at the 13 nt target site. His-AsCpf1-sNLS-sNLS_HBG1-1 RNP generated 60.6% edited alleles and His-AsCpf1-nNLS_HBG1-1 RNP generated 51.1% edited alleles at the highest dose tested (FIG. 3A).

TABLE 6
HBG1-1 gRNA sequence for targeting the CCAAT box in CD34⁺ cells

| | | | | Targeting | Targeting | |
|---|---|---|---|---|---|---|
| | | Targeting | Targeting | domain | domain | |
| | | domain | domain | sequence plus | sequence plus | |
| gRNA | | sequence | sequence | PAM (UUUG) | PAM (TTTG) | |
| ID | OLI-ID | (RNA) | (DNA) | (RNA) | (DNA) | Sense |
| HBG1-1 | OLI13620 | CCUUGUC | CCTTGTC | UUUGCCUUGU | TTTGCCTTG | Antisense |
| | | AAGGCUA | AAGGCTA | CAAGGCUAUU | TCAAGGCT | |
| | | UUGGUC | TTGGTC | GGUC (SEQ ID | ATTGGTC | |
| | | (SEQ ID | (SEQ ID | NO: 1004) | (SEQ ID | |
| | | NO: 1002) | NO: 1003) | | NO: 1005) | |

### Example 2: Co-Delivery of Cpf1 RNP Targeting the CCAAT Box with ssODN Donors Supports Gene Editing in Human Hematopoietic Stem/Progenitor Cells

[0374] RNP comprising HBG1-1 gRNA complexed to the His-AsCpf1-sNLS-sNLS variant (“His-AsCpf1-sNLS-sNLS_HBG1-1 RNP”) were co-delivered by electroporation with single stranded oligodeoxynucleotide donor repair templates (ssODNs) to mPB CD34+ cells. OLI16430 and OLI16424 ssODNs were designed to “encode” a 4 nucleotide deletion and OLI16409 and OLI16410 ssODNs were designed to “encode” a 18 nucleotide deletion (Table 7). Both the 4 nt and 18 nt deletions disrupt the HBG distal CCAAT box and are associated with induction of HBG expression. The ssODNs include 90 nucleotide-long homology arms flanking the encoded absent sequence to create perfect deletion. The ssODNs were modified to contain phosphorothioates (PhTx) at the 5′ and 3′ ends (OLI16430, OLI16424, OLI16409, and OLI16410, Table 7). Briefly, human adult mPB CD34+ cells pre-stimulated for two days in medium supplemented with human cytokines were electroporated with 5 μM RNP comprising the His-AsCpf1-sNLS-sNLS protein complexed to HBG1-1 gRNA (“His-AsCpf1-sNLS-sNLS_HBG1-1 RNP”) either alone, or in combination with 2.5 μM of one of the ssODN donors (OLI16430, OLI164324, OLI16409, or OLI16410). Co-delivery of the RNP and ssODN donor encoding the 18 nt deletion with positive strand homology arms (OLI16409) enhanced the editing frequency from 39.5% without donor to 73.3%, as determined by sequencing analysis of the HBG PCR product from genomic DNA extracted at 72 hours post-electroporation (FIG. 4A).

TABLE 7
Single strand deoxynucleotide donor repair templates “encoding” deletions or
mutations at or near the CCAAT box

| SSODN ID | OLI-ID | Sequence |
|---|---|---|
| Ptx ssODN- | OLI16409 | G*GTGCTTCCTTTTATTCTTCATCCCTAGCCAGCCGCCGGCCCC |
| Positive | | TGGCCTCACTGGATACTCTAAGACTATTGGTCAAGTTTGCCTT |
| Strand-18 nt | | GTCAAGGCTGGCCAACCCATGGGTGGAGTTTAGCCAGGGACC |
| (180) | | GTTTCAGACAGATATTTGCATTGAGATAGTGTGGGGAAGGGG |
| | | CCCCCAAGA*G (SEQ ID NO: 974) |
| Ptx ssODN- | OLI16410 | C*TCTTGGGGGCCCCTTCCCCACACTATCTCAATGCAAATATC |
| Negative | | TGTCTGAAACGGTCCCTGGCTAAACTCCACCCATGGGTTGGCC |
| Strand-18 nt | | AGCCTTGACAAGGCAAACTTGACCAATAGTCTTAGAGTATCC |
| (180) | | AGTGAGGCCAGGGGCCGGCGGCTGGCTAGGGATGAAGAATA |
| | | AAAGGAAGCAC*C (SEQ ID NO: 975) |
| Ptx ssODN- | OLI16411 | G*GCCCCTTCCCCACACTATCTCAATGCAAATATCTGTCTGAA |
| Negative | | ACGGTCCCTGGCTAAACTCCACCCATGGGTTGGCCAGCCTTGC |
| Strand-11 nt | | CTTGAGACAAGGCAAACTTGACCAATAGTCTTAGAGTATCCA |
| (180) | | GTGAGGCCAGGGGCCGGCGGCTGGCTAGGGATGAAGAATAA |
| | | AAGGAAGCACC*C (SEQ ID NO: 976) |
| Ptx ssODN- | OLI16412 | G*GCCCCTTCCCCACACTATCTCAATGCAAATATCTGTCTGAA |
| Negative | | ACGGTCCCTGGCTAAACTCCACCCATGGGTTGGCCAGCCTTGC |
| Strand-13 nt | | CTTGACAAGGCAAACTTGACCAATAGTCTTAGAGTATCCAGT |
| (180) | | GAGGCCAGGGGCCGGCGGCTGGCTAGGGATGAAGAATAAAA |
| | | GGAAGCACCCT*T (SEQ ID NO: 977) |
| Ptx ssODN- | OLI16413 | G*GGTGCTTCCTTTTATTCTTCATCCCTAGCCAGCCGCCGGCCC |
| Positive | | CTGGCCTCACTGGATACTCTAAGACTATTGGTCAAGTTTGCCT |
| Strand-11 nt | | TGTCTCAAGGCAAGGCTGGCCAACCCATGGGTGGAGTTTAGC |
| (180) | | CAGGGACCGTTTCAGACAGATATTTGCATTGAGATAGTGTGG |
| | | GGAAGGGGC*C (SEQ ID NO: 978) |
| Ptx ssODN- | OLI16414 | A*AGGGTGCTTCCTTTTATTCTTCATCCCTAGCCAGCCGCCGGC |
| Positive | | CCCTGGCCTCACTGGATACTCTAAGACTATTGGTCAAGTTTGC |
| Strand-13 nt | | CTTGTCAAGGCAAGGCTGGCCAACCCATGGGTGGAGTTTAGC |
| (180) | | CAGGGACCGTTTCAGACAGATATTTGCATTGAGATAGTGTGG |
| | | GGAAGGGGC*C (SEQ ID NO: 979) |
| Ptx ssODN- | OLI16415 | G*GCCCCTTCCCCACACTATCTCAATGCAAATATCTGTCTGAA |
| Negative | | ACGGTCCCTGGCTAAACTCCACCCATGGGTTGGCCAGCCTTGC |
| Strand 117: | | CTTAACCAATAGCCTTGACAAGGCAAACTTGACCAATAGTCTT |
| G > A (180) | | AGAGTATCCAGTGAGGCCAGGGGCCGGCGGCTGGCTAGGGAT |
| | | GAAGAATAA*A (SEQ ID NO: 980) |
| Ptx ssODN- | OLI16416 | T*TTATTCTTCATCCCTAGCCAGCCGCCGGCCCCTGGCCTCACT |
| Positive | | GGATACTCTAAGACTATTGGTCAAGTTTGCCTTGTCAAGGCTA |
| Strand 117: | | TTGGTTAAGGCAAGGCTGGCCAACCCATGGGTGGAGTTTAGC |
| G > A (180) | | CAGGGACCGTTTCAGACAGATATTTGCATTGAGATAGTGTGG |
| | | GGAAGGGGC*C (SEQ ID NO: 981) |
| Ptx ssODN- | OLI16417 | G*GCCCCTTCCCCACACTATCTCAATGCAAATATCTGTCTGAA |
| Negative | | ACGGTCCCTGGCTAAACTCCACCCATGGGTTGGCCAGCCTTGC |
| Strand-1 nt | | CTTGCCAATAGCCTTGACAAGGCAAACTTGACCAATAGTCTTA |
| (180) | | GAGTATCCAGTGAGGCCAGGGGCCGGCGGCTGGCTAGGGATG |
| | | AAGAATAAA*A (SEQ ID NO: 982) |
| Ptx ssODN- | OLI16418 | T*TTTATTCTTCATCCCTAGCCAGCCGCCGGCCCCTGGCCTCAC |
| Positive | | TGGATACTCTAAGACTATTGGTCAAGTTTGCCTTGTCAAGGCT |
| Strand-1 nt | | ATTGGCAAGGCAAGGCTGGCCAACCCATGGGTGGAGTTTAGC |
| (180) | | CAGGGACCGTTTCAGACAGATATTTGCATTGAGATAGTGTGG |
| | | GGAAGGGGC*C (SEQ ID NO: 983) |
| Ptx ssODN- | OLI16419 | T*GGCTAAACTCCACCCATGGGTTGGCCAGCCTTGCCTTGATA |
| Negative | | GCCTTGACAAGGCAAACTTGACCAATAGTCTTAGAGTATCCA |
| Strand-4 nt | | GTGAGGCCAGGGGCCGGCGGCTGGCTAGGGATGAA*G (SEQ |
| 40/80 (120) | | ID NO: 984) |
| Ptx ssODN- | OLI16420 | C*CACCCATGGGTTGGCCAGCCTTGCCTTGATAGCCTTGACAA |
| Negative | | GGCAAACTTGACCAATAGTCTTAGAGTATCCAGTGAGGCCAG |
| Strand-4 nt | | GGGCCGGCGGCTGGC*T (SEQ ID NO: 985) |
| 30/70 (100) | | |
| Ptx ssODN- | OLI16421 | A*AACGGTCCCTGGCTAAACTCCACCCATGGGTTGGCCAGCCT |
| Negative | | TGCCTTGATAGCCTTGACAAGGCAAACTTGACCAATAGTCTTA |
| Strand-4 nt | | GAGTATCCAGTGAG*G (SEQ ID NO: 986) |
| (100) | | |
| Ptx ssODN- | OLI16422 | T*ATCTGTCTGAAACGGTCCCTGGCTAAACTCCACCCATGGGT |
| Negative | | TGGCCAGCCTTGCCTTGATAGCCTTGACAAGGCAAACTTGACC |
| Strand-4 nt | | AATAGTCTTAGAGTATCCAGTGAGGCCAGGGGCC*G (SEQ ID |
| (120) | | NO: 987) |
| Ptx ssODN- | OLI16423 | T*CAATGCAAATATCTGTCTGAAACGGTCCCTGGCTAAACTCC |
| Negative | | ACCCATGGGTTGGCCAGCCTTGCCTTGATAGCCTTGACAAGGC |
| Strand-4 nt | | AAACTTGACCAATAGTCTTAGAGTATCCAGTGAGGCCAGGGG |
| (140) | | CCGGCGGCTGGC*T (SEQ ID NO: 988) |
| Ptx ssODN- | OLI16424 | G*GCCCCTTCCCCACACTATCTCAATGCAAATATCTGTCTGAA |
| Negative | | ACGGTCCCTGGCTAAACTCCACCCATGGGTTGGCCAGCCTTGC |
| Strand-4 nt | | CTTGATAGCCTTGACAAGGCAAACTTGACCAATAGTCTTAGA |
| (180) | | GTATCCAGTGAGGCCAGGGGCCGGCGGCTGGCTAGGGATGAA |
| | | GAATAAAAGG*A (SEQ ID NO: 989) |
| Ptx ssODN- | OLI16425 | T*ACTCTAAGACTATTGGTCAAGTTTGCCTTGTCAAGGCTATC |
| Positive | | AAGGCAAGGCTGGCCAACCCATGGGTGGAGTTTAGCCAGGGA |
| Strand-4 nt | | CCGTTTCAGACAGATATTTGCATTGAGATAGTGTG*G (SEQ ID |
| 40/80 (120) | | NO: 990) |
| Ptx ssODN- | OLI16426 | C*TATTGGTCAAGTTTGCCTTGTCAAGGCTATCAAGGCAAGGC |
| Positive | | TGGCCAACCCATGGGTGGAGTTTAGCCAGGGACCGTTTCAGA |
| Strand-4 nt | | CAGATATTTGCATTG*A (SEQ ID NO: 991) |
| 30/70 (100) | | |
| Ptx ssODN- | OLI16427 | C*CTCACTGGATACTCTAAGACTATTGGTCAAGTTTGCCTTGTC |
| Positive | | AAGGCTATCAAGGCAAGGCTGGCCAACCCATGGGTGGAGTTT |
| Strand-4 nt | | AGCCAGGGACCGTT*T (SEQ ID NO: 992) |
| (100) | | |
| Ptx ssODN- | OLI16428 | C*GGCCCCTGGCCTCACTGGATACTCTAAGACTATTGGTCAAG |
| Positive | | TTTGCCTTGTCAAGGCTATCAAGGCAAGGCTGGCCAACCCATG |
| Strand-4 nt | | GGTGGAGTTTAGCCAGGGACCGTTTCAGACAGAT*A (SEQ ID |
| (120) | | NO: 993) |
| Ptx ssODN- | OLI16429 | A*GCCAGCCGCCGGCCCCTGGCCTCACTGGATACTCTAAGACT |
| Positive | | ATTGGTCAAGTTTGCCTTGTCAAGGCTATCAAGGCAAGGCTGG |
| Strand-4 nt | | CCAACCCATGGGTGGAGTTTAGCCAGGGACCGTTTCAGACAG |
| (140) | | ATATTTGCATTG*A (SEQ ID NO: 994) |
| Ptx ssODN- | OLI16430 | T*CCTTTTATTCTTCATCCCTAGCCAGCCGCCGGCCCCTGGCCT |
| Positive | | CACTGGATACTCTAAGACTATTGGTCAAGTTTGCCTTGTCAAG |
| Strand-4 nt | | GCTATCAAGGCAAGGCTGGCCAACCCATGGGTGGAGTTTAGC |
| (180) | | CAGGGACCGTTTCAGACAGATATTTGCATTGAGATAGTGTGG |
| | | GGAAGGGGC*C (SEQ ID NO: 995) |
| Ptx ssODN- | OLI16431 | C*CCTGGCCTCACTGGATACTCTAAGACTATTGGTCAAGTTTG |
| Positive | | CCTTGTCAAGGCTGGCCAACCCATGGGTGGAGTTTAGCCAGG |
| Strand-18nt | | GACCGTTTCAGACAG*A (SEQ ID NO: 1040) |
| (100) | | |

*Represents phosphorothioate modification

[0375] Further analysis of the specific type and size of deletions at the target site revealed that in the presence of the 18 nt positive strand donor (OLI16409), 57.3% of alleles carried the 18 nt deletion compared to 7.5% of alleles when the His-AsCpf1-sNLS-sNLS_HBG1-1 RNP was delivered alone (FIG. 4B). The ssODN co-delivery mediated precise repair of the DNA DSB because the 18 nt deletion represented 71.2% of all the indels generated with co-delivery of ssODN OLI16409 and His-AsCpf1-sNLS-sNLS_HBG1-1 RNP, whereas the 18 nt deletion represented only 19.0% of all the indels were generated when delivering His-AsCpf1-sNLS-sNLS_HBG1-1 RNP alone (FIG. 4C).

[0376] Although the data in FIGS. 4A-4C originally suggested that codelivery of Cpf1 RNP with ssODN donors increased precise gene editing of genomic DNA resulting in the 18 nt deletion, subsequent testing repeating the experiment in Example 2 confirmed that these data were an artifact of the experiment. Nonetheless, data acquired from the subsequent repeated experiments testing the AsCpf1 RNP using the guide RNA HBG1-1 and ssODN OLI16409 indicated that codelivery of an ssODN donor supports increased total editing in human mPB-CD34+ cells, although not associated with precise repair of the DNA DSB toward the “−18 nt deletion” (see Example 10).

### Example 3: Cpf1 RNP Containing gRNA Targeting the Distal CCAAT Box Region of the HBG Promoter Supports Gene Editing in Human Hematopoietic Stem/Progenitor Cells which Promotes Induction of HbF Protein Expression in the Erythroid Progeny

[0377] Guide RNA HBG1-1 (Table 8) having a targeting domain comprising SEQ ID NO:1002 (Table 9), targets a site within the HBG promoter (FIG. 5A). The HBG1-1 gRNA (SEQ ID NO:1022) was complexed to wild-type AsCpf1 (AsCpf1-sNLS-sNLS, SEQ ID NO:1001) to form an RNP (“AsCpf1-HBG1-1-RNP”, Table 8). This complex (5 μM or 20 μM) was then electroporated into mobilized peripheral blood (mPB) derived CD34+ cells using either the Amaxa nucleofector (Lonza), or the MaxCyte GT (MaxCyte, Inc.) electroporation device. The level of insertions/deletions at the target site was analyzed by Illumina sequencing (NGS) of the PCR amplified target site three days after electroporation. AsCpf1-HBG1-1-RNP supported on-target editing of 43% and 17%, respectively, on the Amaxa and MaxCyte electroporation systems (FIGS. 6A (Amaxa) and 6B (MaxCyte)). Following the editing of mPB CD34+ cells, ex vivo differentiation into the erythroid linage was performed for 18 days (Giarratana 2011). Then, relative expression levels of gamma-globin chains (over total beta-like globin chains) was measured by UPLC (FIGS. 6A (Amaxa) and 6B (MaxCyte)). AsCpf1-HBG1-1-RNP led to an increase of gamma-globin expression by up to 21% above levels detected in cells derived from mock electroporated mPB CD34+ cells (FIG. 6A).

TABLE 8
RNP components

| | Protein | RNP | | gRNA | gRNA sequence |
|---|---|---|---|---|---|
| gRNA ID | variant | components | RNP ID | modification | (RNA) |
| HBG1-1 | AsCpf1- | gRNA | HBG1-1- | Synthetic | UAAUUUCUACUC |
| gRNA | SNLS-SNLS | + | AsCpf1-RNP | unmodified | UUGUAGAUCCUU |
| | (SEQ ID | AsCpf1 WT | | | GUCAAGGCUAUU |
| | NO: 1001) | | | | GGUC (SEQ ID |
| | | | | | NO: 1022) |
| HBG1-1 | His-AsCpf1- | gRNA | HBG1-1- | Synthetic | UAAUUUCUACUC |
| gRNA | SNLS-SNLS | + | AsCpf1H800A- | unmodified | UUGUAGAUCCUU |
| | H800A | AsCpf1 | RNP | | GUCAAGGCUAUU |
| | (SEQ ID | H800A | | | GGUC (SEQ ID |
| | NO: 1032) | | | | NO: 1022) |
| HBG1-1 | His-AsCpf1- | gRNA | HBG1-1- | 5′OMe- | UAAUUUCUACUC |
| gRNA | SNLS-SNLS | + | AsCpf1H800A- | PS2OMe | UUGUAGAUCCUU |
| | H800A | AsCpf1 | RNP | | GUCAAGGCUAUU |
| | (SEQ ID | H800A | | | GGmU/PS2/mC |
| | NO: 1032) | | | | (SEQ ID NO: 1041) |
| tSpA | SpCas9WT | dead gRNA | tSpA-Cas9- | Synthetic 5′- | mG*mG*mC*UGG |
| dead gRNA | (SEQ ID | + | RNP | 3′ 3xPSOMe | CCAACCCAUGU |
| | NO: 1033) | SpCas9 WT | | | UUUAGAGCUAG |
| | | | | | AAAUAGCAAGU |
| | | | | | UAAAAUAAGGC |
| | | | | | UAGUCCGUUAU |
| | | | | | CAACUUGAAAA |
| | | | | | AGUGGCACCGA |
| | | | | | GUCGGUGCmU* |
| | | | | | mU*mU*U |
| | | | | | (SEQ ID NO: 1024) |
| SpA | His-NLS- | gRNA | SpA-D10A- | Synthetic 5′- | mG*mG*mC*AAG |
| gRNA | SpCas9D10A | + | RNP | 3′ 3xPSOMe | GCUGGCCAACC |
| | (SEQ ID | SpCas9 | | | CAUGUUUUAGA |
| | NO: 1034) | nickase | | | GCUAGAAAUAG |
| | | | | | CAAGUUAAAAU |
| | | | | | AAGGCUAGUCC |
| | | | | | GUUAUCAACUU |
| | | | | | GAAAAAGUGGC |
| | | | | | ACCGAGUCGGU |
| | | | | | GCmU*mU*mU*U |
| | | | | | (SEQ ID NO: 1025) |
| SpG | His-NLS- | gRNA | SpG-D10A- | Synthetic 5′- | mU*mA*mG*UCU |
| gRNA | SpCas9D10A | 1 | RNP | 3′ 3xPSOMe | UAGAGUAUCCA |
| | (SEQ ID | SpCas9 | | | GUGGUUUUAGA |
| | NO: 1034) | nickase | | | GCUAGAAAUAG |
| | | | | | CAAGUUAAAAU |
| | | | | | AAGGCUAGUCC |
| | | | | | GUUAUCAACUU |
| | | | | | GAAAAAGUGGC |
| | | | | | ACCGAGUCGGU |
| | | | | | GCmU*mU*mU*U |
| | | | | | (SEQ ID NO: 1026) |
| Sp182 | SpCas9WT | dead gRNA | Sp182-Cas9- | Synthetic 5′- | mU*mU*mA*GAG |
| dead gRNA | (SEQ ID | + | RNP | 3′ 3xPSOMe | UAUCCAGUGGU |
| | NO: 1033) | SpCas9 WT | | | UUUAGAGCUAG |
| | | | | | AAAUAGCAAGU |
| | | | | | UAAAAUAAGGC |
| | | | | | UAGUCCGUUAU |
| | | | | | CAACUUGAAAA |
| | | | | | AGUGGCACCGA |
| | | | | | GUCGGUGCmU* |
| | | | | | mU*mU*U |
| | | | | | (SEQ ID NO: 1027) |

“His” refers to a six-histidine purification sequence
“AsCpf1” refers to the Acidaminococcus sp. Cpf1 protein sequence
“nNLS” refers to the nucleoplasmin NLS, and “sNLS” refers to the SV40 NLS
“SpCas9” refers to the S. Pyogenes Cas9 protein sequence
“*” represents phosphorothioate modification
“PS” represents phosphorothioate modification
“PS2” represents phosphorodithioate modification
“OMe” represents a 2-o-methyl modification
“m” represents a 2-o-methyl modification

TABLE 9
guide RNA targeting domain sequences

| | gRNA Targeting domain | gRNA Targeting domain |
|---|---|---|
| gRNA ID | sequence (RNA) | sequence (DNA) |
| HBG1-1 | CCUUGUCAAGGCUAUUGGUC | CCTTGTCAAGGCTATTGGTC |
| gRNA | (SEQ ID NO: 1002) | (SEQ ID NO: 1003) |
| Sp182 | UUAGAGUAUCCAGUG | TTAGAGTATCCAGTG |
| dgRNA | (SEQ ID NO: 1028) | (SEQ ID NO: 1029) |
| SpG | UAGUCUUAGAGUAUCCAGUG | TAGTCTTAGAGTATCCAGTG |
| gRNA | (SEQ ID NO: 359) | (SEQ ID NO: 1030) |
| SpA | GGCAAGGCUGGCCAACCCAU (SEQ | GGCAAGGCTGGCCAACCCAT |
| gRNA | ID NO: 941) | (SEQ ID NO: 944) |
| tSpA | GGCUGGCCAACCCAU | GGCTGGCCAACCCAT |
| dgRNA | (SEQ ID NO: 326) | (SEQ ID NO: 1031) |

### Example 4: Cpf1 RNP Editing Efficiency at the CCAAT Box Region of the HBG Promoter is Enhanced when Co-Delivered with S. pyogenes Cas9 RNP with No Impact on Viability

[0378] It was hypothesized that the co-delivery of Cpf1-RNP with proximally targeting S. pyogenes Cas9 RNP, either catalytically inactive or introducing single nicks, could enhance editing levels at the target site. In an attempt to enhance Cpf1-RNP mediated editing at the distal CCAAT box region of the HBG promoter, HBG1-1-AsCpf1H800A-RNP (composed of His-AsCpf1-sNLS-sNLS-H800A (SEQ ID NO: 1032) complexed to HBG1-1 gRNA with a 3′ modification as shown in Table 8 (SEQ ID NO:1041) was co-delivered into mPB CD34+ cells with: (1) S. pyogenes Cas9 D10A RNP containing a Cas9 D10A protein (His-NLS-SpCas9D10A, SEQ ID NO: 1034) complexed to a full length guide RNA (100mer) selected from: (a) SpA gRNA (Tables 8, 9; FIG. 5B) (“SpA-D10A-RNP”, Table 8) or (b) SpG gRNA (Tables 8, 9; FIG. 5C) (“SpG-D10A-RNP”, Table 8)); (2) S. pyogenes WT Cas9 RNP containing a WT Cas9 protein (SpCas9WT, SEQ ID NO:1033) complexed to a truncated dead guide RNA (95mer—with a shortened protospacer region) selected from (a) tSpA dgRNA (Tables 8, 9; FIG. 5E) (“tSpA-Cas9-RNP”, Table 8); (b) Sp182 dgRNA (Tables 8, 9; FIG. 5F) (“Sp182-Cas9-RNP”, Table 8); or (c) tSpA-Cas9-RNP and Sp182-Cas9-RNP (Tables 8, 9, FIG. 5D). The RNP complexes were electroporated using the MaxCyte GT device (MaxCyte, Inc). The level of insertions/deletions at the target site was then analyzed by Illumina sequencing (NGS) of the PCR amplified target site three days after electroporation. In all combinations tested, irrespective of the S. pyogenes Cas9 enzyme used (D10A or WT) and of PAM orientation, total editing was increased above levels observed following Maxcyte delivery of HBG1-1-AsCpf1H800A-RNP alone (FIG. 7 and Table 10). In addition there was no detrimental effect on viability of mPB CD34+ cells when S. pyogenes Cas9 RNP were co-delivered (FIG. 8).

TABLE 10
Summary of indels and gamma globin expression with
each RNP combination at the maximum RNP dose tested

| | | | | Gamma Globin (over |
|---|---|---|---|---|
| Cpf1 RNP | Cas9 RNP1 | Cas9 RNP2 | Indels (NGS) | total beta-like chains) |
| — | — | — | 0% | 13.5% |
| HBG1-1- | — | — | 8.0% | 20.0% |
| AsCpf1H800A- | | | | |
| RNP | | | | |
| HBG1-1- | SpG-D10A- | — | 88.6% | 30.2% |
| AsCpf1H800A- | RNP | | | |
| RNP | | | | |
| HBG1-1- | SpA-D10A- | — | 42.6% | 32.5% |
| AsCpf1H800A- | RNP | | | |
| RNP | | | | |
| HBG1-1- | tSpA-Cas9-RNP | — | 32.2% | 19.8% |
| AsCpf1H800A- | | | | |
| RNP | | | | |
| HBG1-1- | Sp182-Cas9- | — | 85.4% | 42.8% |
| AsCpf1H800A- | RNP | | | |
| RNP | | | | |
| HBG1-1- | tSpA-Cas9-RNP | Sp182-Cas9- | 80.1% | 33.7% |
| AsCpf1H800A- | | RNP | | |
| RNP | | | | |

### Example 5: Cpf1 Editing Profile can be Manipulated with Co-Delivery of S. pyogenes Cas9-D10A-RNP

[0379] In addition to the increase in total editing observed when HBG1-1-AsCpf1H800A-RNP was co-delivered to mPB CD34+ cells with S. pyogenes Cas9-D10A-RNP (FIG. 7), changes to the indel profile were also observed. The introduction of a single strand break proximal to the Cpf1-RNP target site by the D10A enzyme (FIG. 9A) altered the directionality, length and/or position of the indels (FIG. 9B). For example, Sp182-D10A-RNP strongly shifted the profile toward the nicking site introduced by the D10A RNP, with deletions of various length extending from the Cpf1 cut site toward the upstream nicking site (Sp182-D10A-RNP, FIG. 9B). While the SpA-D10A-RNP also promoted the generation of deletions extending from the HBG1-1-AsCpf1H800A-RNP cut site to the nicking site introduced by the D10A enzyme (here located downstream), in this case, additional deletions apparently originating from the nicking site, but not extending fully to the HBG1-1-AsCpf1H800A-RNP cut site, were also produced (SpA-D10A-RNP, FIG. 9B).

[0380] It is probable that the orientation, target strand, and distance of the S. pyogenes Cas9-D10A-RNP target site to the Cpf1-RNP target site leads to differences in the position and length of the mutations promoted by the additional DNA nick (FIG. 9A). It should be noted that in certain applications this directional manipulation of the indel profile, i.e., an increase in the frequency of indels occurring between the Cpf1-RNP and S. pyogenes Cas9 D10A-RNP binding sites, could be used to favor a desired editing outcome, to increase the rate of productive indels (e.g., indels disrupting a targeted site). In the case set-out within, to disrupt the dCCAAT target region and induce HbF protein expression, the co-delivery of HBG1-1-AsCpf1H800A-RNP with S. pyogenes D10A-RNP led to an increase of gamma globin levels by 16.7% (SpG-D10A-RNP) or 19.0% (SpA-D10A-RNP) above levels detected in mock electroporated cells, as detected by UPLC analysis after 18 days of erythroid differentiation post electroporation (FIG. 7 and Table 10). The frequency of productive indels was higher when pairing HBG1-1-AsCpf1H800A-RNP with SpA-D10A-RNP (versus SpG-D10A-RNP) as a higher increase in HbF levels (19% with Cas9D10A-SpA-RNP vs 16.7% with SpG-D10A-RNP) was achieved from a lower editing level (42.6% with SpA-D10A-RNP vs 88.6% with SpG-D10A-RNP) (FIG. 7 and Table 10).

### Example 6: Cpf1 Editing is Increased without Altering the Editing Profile in the Presence of S. Pyogenes Cas9 WT RNP Containing a Dead Guide RNA

[0381] When co-delivering HBG1-1-AsCpf1H800A-RNP (at a fixed dose of 6 PM) to mPB CD34+ cells with increasing doses of Sp182-Cas9-RNP (complexed with a truncated, 95mer dead gRNA, Sp182), using the MaxCyte electroporator device, an editing boost has been observed up to greater than 10-fold (85.4% editing with the highest dose of Sp182-Cas9-RNP versus 8.0% when HBG1-1-AsCpf1H800A-RNP was delivered alone) (FIG. 7). The levels of editing achieved here by co-delivering Sp182-Cas9-RNP also greatly surpassed the levels of editing obtained using the MaxCyte electroporator device when HBG1-1-AsCpf1H800A-RNP was delivered alone at doses as high as 20 uM (FIG. 6B). In contrast to the results observed by co-delivering a D10A-RNP (in Example 5), the increase in editing achieved by co-delivering HBG1-1-AsCpf1H800A-RNP with Sp182-Cas9-RNP (Cas9-WT complexed with a truncated gRNA) was not associated with an apparent impact on the indel profile. The indels detected in electroporated cells were centered around the Cpf1 cut site in an approximal symmetrical fashion and no indels were detected at the Sp182-Cas9-RNP target site (FIG. 10A). Of note, 96% of the total indels were disrupting the distal-CCAAT box, and 79.5% of total indels disrupted 3 or more nucleotides of the CCAAT box motif (FIG. 10B). Further dosing optimization using HBG1-1-AsCpf1H800A-RNP (composed of His-AsCpf1-sNLS-sNLS-H800A (SEQ ID NO: 1032) complexed to HBG1-1 gRNA (SEQ ID NO:1022)) and Sp182-Cas9-RNP enabled editing levels of up to 92% in mPB-CD34+ cells at 120 hours post-electroporation using the MaxCyte device, and lead to gamma chain expression levels 32% above background in erythroid derived cells (41% of gamma chains in treated cells, 8% in mock treated cells) (FIG. 11). Those results demonstrate that an RNP composed of WT S. pyogenes Cas9 protein complexed with a truncated gRNA can increase the editing from a proximally binding Cpf1-RNP without introducing detectable levels of editing at its own binding site nor noticeably affecting the length nor directionality of indels generated by the Cpf1-RNP. Here, the editing enhancement provided by the Sp182-Cas9-RNP enables high editing of the HBG1-1-AsCpf1H800A-RNP at the HBG promoter, with a high frequency of indels disrupting the distal CCAAT box target motif and leading to therapeutically relevant levels of gamma chain expression in the bulk erythroid progeny of the electroporated cells.

### Example 7: Clonal HbF Distribution within Cell Population Edited with Cpf1 gRNA Targeting the Distal CCAAT Box

[0382] A single cell experiment was next performed to evaluate the distribution of gamma chain expression levels in erythroid cells derived from mPB CD34+ cells electroporated with the HBG1-1-AsCpf1H800A-RNP (composed of His-AsCpf1-sNLS-sNLS-H800A (SEQ ID NO:1032) complexed to HBG1-1 gRNA with a 3′ modification as shown in Table 8 (SEQ ID NO:1041))+Sp182-Cas9-RNP combination (FIG. 5F, Table 8). After being left to recover during 48 hours post-electroporation, the cells were sorted by Fluorescence Activated Cell Sorting (FACS) at 1-cell/well in non-tissue culture treated 384-well plates. The cells were then differentiated and expanded clonally for 18 days into the erythroid lineage (adapted from Giarratana 2011). UPLC analysis was performed to determine the distribution of gamma chain expression levels (percentage of gamma chains/[total beta-like chains]) in the clonal erythroid progeny of cells derived from the total population of mPB-CD34+ cells initially edited. It is considered that in order to achieve a functional benefit and alleviate symptoms associated with sickle cell disease, ˜30% of the erythroid cells should have fetal hemoglobin levels greater than 30%. Of the clones analyzed, 83.1% had gamma chains levels above the median level detected in erythroid clones derived from mock electroporated mPB CD34+ cells (median value=18.8%), 64.2% had gamma chains levels exceeding 30% of total beta-like and 35.8% had gamma chains levels exceeding 48.8% of total beta-like (30%+18.8% median level in control cells) (FIG. 12).

### Example 8: Screen of Cpf1 gRNAs Targeting the HBG Promoter Region

[0383] To identify other AsCpf1 gRNA that could be used as a component of a single RNP or in combination with a “booster element” to increase editing of the HBG promoter region in CD34+ cells and induce fetal globin expression in the erythroid progeny of modified cells, His-AsCpf1-NLS-NLS (“AsCpf1,” SEQ ID NO:1000); AsCpf1 542RK607R (“AsCpf1 RR,” SEQ ID NO:1036); or AsCpf S542R/K548V/N552R (“AsCpf1 RVR,” SEQ ID NO: 1037) gRNA sequences targeting several domains of the HBG promoter (Table 11) were designed (listed in Table 12). AsCpf1 RR and AsCpf1 RVR are engineered AsCpf1 variants which recognize TYCV/ACCC/CCCC and TATV/RATR PAMs, respectively (Gao 2017).

TABLE 11
Subdomains of the HBG genomic region

| Genomic | | |
|---|---|---|
| Coordinate of | | |
| HbG* | Nucleotides | Name of Region |
| Chr 11 | TCCTAAAGCT TGGAACACTT | Region 1: Downstream of |
| (NC_000011.10): | TCCCTTCCTT AAGAACCATC | HBG1 |
| 5,247,883- | CTTGCTACTC AGCTGCAATC | |
| 5,248,186 | AATCCAGCCC CCAGGTCTTC | |
| | ACTGAACCTT TTCCCATCTC | |
| | TTCCAAAACA TCTGTTTCTG | |
| | AGAAGTCCTG TCCTATAGAG | |
| | GTCTTTCTTC CCACCGGATT | |
| | TCTCCTACAC CATTTACTCC | |
| | CACTTGCAGA ACTCCCGTGT | |
| | ACAAGTGTCT TTACTGCTTT | |
| | TATTTGCTCA TCAAAATGCA | |
| | CATCTCATAT AAAAATAAAT | |
| | GAGGAGCATG CACACACCAC | |
| | AAACACAAAC AGGCATGCAG | |
| | AAAT (SEQ ID NO: 1118) | |
| Chr 11 | ATAAAGATGA ACCCATAGTG | Region 2: HBG1 Intron 2- A |
| (NC_000011.10): | AGCTGAGAGC TCCAGCCTGG | |
| 5,248,509- | CCTCCAGATA ACTACACACC | |
| 5,249,173 | AAGCTTCCAC CCAGAATCAA | |
| | GCCTATGTTA ACTTCCCTCA | |
| | AAGCCTGAGA TTTTGCCTTC | |
| | CCATTAAATG CAGGTAGTTG | |
| | TTCCCCTTCA AGCACTAGTC | |
| | ACTGGCCATA ATTTAAATCT | |
| | TGCTATCTTC TTGCCACCAT | |
| | GAACCCTGTA TGTTGTAGGC | |
| | TGAAGACGTT AAAAGAAACA | |
| | CACGCTGACA CACACACACA | |
| | CACGCGCGCG CGCACACACA | |
| | CACACACACA CAGAGCTGAC | |
| | TTTCAAAATC TACTCCAGCC | |
| | CAAATGTTTC AATTGTTCCT | |
| | CACCCCTGGA CATACTTTGC | |
| | CCCCATCTGG AATTAAAGGA | |
| | TATAAGTTTG TAATGAAGCA | |
| | TTAGCAGCAT TTTATATGTG | |
| | TCCAGCTGAT ATAGGAATAG | |
| | CCTTAGCAAT GTATGTTTGG | |
| | CCACCAAAGT TCCCCACTTT | |
| | GACTGAGCCA ATATATGCCT | |
| | TCTGCCTGCA TCTTTTTAAC | |
| | GACCATACTT GTCCTGCCTC | |
| | CAGATAGATG TTTTAAAACA | |
| | ACAAAAATGA GGGAAAGATG | |
| | AAAGTTCTTT CTACTGGAAT | |
| | CTAATAAAGA AAAGTCATTT | |
| | TCCTCATTTC CACCTCTCTT | |
| | TTCTCAAAGT CAAAATTGTC | |
| | CATCT (SEQ ID NO: 1119) | |
| Chr 11 | CCCTAAAACA TTACCACTGG | Region 3: HBG1 Intron 2- B |
| (NC_000011.10): | GTCTCAGCCC AGTTAGTCCT | |
| 5,249,198- | CTGCAGTTTC TTCACCCCCA | |
| 5,249,362 | ACCCCAGTAT CTTCAAACAG | |
| | CTCACACCCT GCTGTGCTCA | |
| | GATCAATACT CCGTTGTCTA | |
| | AGTTGCCTCG AGACTAAAGG | |
| | CAACAGGGCT GAAACATCTC | |
| | CTGGA (SEQ ID NO: 1120) | |
| Chr 11 | CTGTGAGATT GACAAGAACA | Region 4: HBG1 Intron 1 |
| (NC_000011.10): | GTTTGACAGT CAGAAGGTGC | |
| 5,249,591- | CACAAATCCT GAGAAGCGAC | |
| 5,249,712 | CTGGACTTTT GCCAGGCACA | |
| | GGGTCCTTCC TTCCCTCCCT | |
| | TGTCCTGGTC ACCAGAGCCT AC | |
| | (SEQ ID NO: 1121) | |
| Chr 11 | GCCGCCGGCC CCTGGCCTCA | Region 5: HBG1-60 nt region |
| (NC_000011.10): | CTGG (SEQ ID NO: 1122) | from Transcription Start Site |
| 5,249,904- | | (TSS) |
| 5,249,927 | | |
| Chr 11 | CCTTGTCAAG GCTATTGGTC | Region 6: HBG1-110 nt region |
| (NC_000011.10): | AAGGCAAGGC TGG (SEQ ID | from TSS |
| 5,249,955- | NO: 1123) | |
| 5,249,987 | | |
| Chr 11 | TGAGATAGTG TGGGGAAGGG | Region 7: HBG1-200 nt region |
| (NC_000011.10): | GCCCCC AAGAGGATAC (SEQ ID | from TSS |
| 5,250,040- | NO: 1124) | |
| 5,250,075 | | |
| Chr 11 | TATAGCCTTT GCCTTGTTCC | Region 8: HBG1-250 nt region |
| (NC_000011.10): | GATTCAGTCA TTCCAGTTTT T | from TSS |
| 5,250,089- | (SEQ ID NO: 1125) | |
| 5,250,129 | | |
| Chr 11 | TCTTCCCTTT AGCTAGTTTC | Region 9: HBG1-333 nt region |
| (NC_000011.10): | CTTCTCCCAT CATAGAGGAT | from TSS |
| 5,250,141- | ACCAGGACTT CTTTTGTCAG | |
| 5,250,254 | CCGTTTTTTA CCTTCTTGTC | |
| | TCTAGCTCCA GTGAGGCCTG | |
| | TAGTTTAAAG CTAA (SEQ ID | |
| | NO: 1126) | |
| Chr 11 | CCACAGTTTC AGCGCAGTAA | Region 10: HBG1-650 nt |
| (NC_000011.10): | TAGATTAGTG TTACATAATA | region from TSS |
| 5,250,464- | TAAGACCTAA TGCTTACCTC | |
| 5,250,549 | AATATCTACT TATCCGTACC | |
| | TATTTG (SEQ ID NO: 1127) | |
| Chr 11 | TATTCAGGTA TGTATGTATA | Region 11: HBG1-800 nt |
| (NC_000011.10): | CACCAGATGA TGTGTATTTA | region from TSS |
| 5,250,594- | CCACTGGATA AGTGTGTGTG | |
| 5,250,735 | CTGGCTGATG ACCCAGGGTT | |
| | TTGGCGTAGC TCTTCTATGC | |
| | TCAGTAAAGA TGATGGTAGA | |
| | ATGTTCTTTG GCAGGTACTG TG | |
| | (SEQ ID NO: 1128) | |
| Chr 11 | CAATAAAGAT GAACCCATAG | Region 12: HBG2 Intron 2- A |
| (NC_000011.10): | TGAGCTGAGA GCTCCAGCCT | |
| 5,253,425- | GGCCTCCAGA TAACTACACA | |
| 5,254,121 | CCAAGCTTCC ACCCAGAATC | |
| | AAGCCTATGT TAACTTCCCT | |
| | CAAAGCCTGA GATTTTGCTT | |
| | TCCCATTAAA TGCAGGTAGT | |
| | TGTTCTTCTT GCAGCACTAG | |
| | TCACTGGCCA TAATTTAAAT | |
| | CTTGTTATCT TCTTGCCACC | |
| | ATGAACCCTG TATGCTGTAG | |
| | GCTGAAAACG TTAAAAGAAA | |
| | CACACGCTCT CACACACACA | |
| | CAAACACACG CGCGCACACA | |
| | CACACACACA CACACAGAGC | |
| | TGACTTTCAA AATCTACTCC | |
| | AGCCCAAATG TTTCAATTGT | |
| | TCCTCACCCC TGGACATACT | |
| | TTGCCCCCAT CTGGAATTAA | |
| | AGGATATAAG TTTGTAATGA | |
| | AGCATTAGCA GCATTTTATA | |
| | TGTGTCCAGC TGATATAGGA | |
| | ATAGCCTTAG CAATGTATGT | |
| | TTGGCCACCA AAGTTCCCCA | |
| | CTTTGACTGA GCCAATATAT | |
| | GCCTTCTGCC TGCATCTTTT | |
| | TAATGACCAT ACTTGTCCTG | |
| | CCTCCAGATA GATGTTTTAA | |
| | AACGAATAAC AAAAATAGGG | |
| | GAAAGGTGAA AGTTCTTTCT | |
| | ACCGAAATCT AATAAAGAAA | |
| | AGTCATTTTC CTCATTTCCA | |
| | CCTCTCTTTT CTCAAAGTCA | |
| | AAGTTGTCCA TCTAGATTTT | |
| | CAGAGGCACT CCTTAGG (SEQ ID | |
| | NO: 1129) | |
| Chr 11 | CCCTAAAACA TTGCCACTGG | Region 13: HBG2 Intron 2-B |
| (NC_000011.10): | GTCTCAGCCC AGTTAGTCCT | |
| 5,254,122- | CTGCAGTTTC TTCACTCCCA | |
| 5,254,306 | ACCCCAGTAT CTTCAAACAG | |
| | CTCACACCCT GCTGTGCTCA | |
| | GATCAATACT CAGTTGTCTA | |
| | AGTTGCCTCG AGACTAAAGG | |
| | CAACAGTGCT GAAACATCTC | |
| | CTGGACTCAC CTTGAAGTTC | |
| | TCAGG (SEQ ID NO: 1130) | |
| Chr 11 | AGCCTGTGAG ATTGACAAGA | Region 14: HBG2 Intron 1 |
| (NC_000011.10): | ACAGTTTGAC AGTCAGAAGG | |
| 5,254,511- | TGCCACAAAT CCTGAGAAGC | |
| 5,254,648 | GACCTGGACT TTTGCCAGGC | |
| | ACAGGGTCCT TCCTTCCCTC | |
| | CCTTGTCCTG GTCACCAGAG | |
| | CCTACCTTCC CAGGGTT (SEQ ID | |
| | NO: 1131) | |
| Chr 11 | CCGCCGGCCC CTGGCCTCAC | Region 15: HBG2-60 nt region |
| (NC_000011.10): | TGGATACTCT AAGACTAT (SEQ ID | from TSS |
| 5,254,829- | NO: 1132) | |
| 5,254,866 | | |
| Chr 11 | CCTTGTCAAG GCTATTGGTC | Region 16: HBG2-110 nt |
| (NC_000011.10): | AAGGCAAGGC T | region from TSS |
| 5,254,879- | (SEQ ID NO: 1133) | |
| 5,254,909 | | |
| Chr 11 | CAGGGACCGT TTCAGACAGA | Region 17: HBG2-200 nt |
| (NC_000011.10): | TATTTGCATT GAGATAGTGT | region from TSS |
| 5,254,935 | GGGGAAGGGG CCCCCAAGAG | |
| 5,255,009 | GATACTGCTG CTTAA (SEQ ID | |
| | NO: 1134) | |
| Chr 11 | TTGCCTTGTT CCGATTCAGT | Region 18: HBG2-250 nt |
| (NC_000011.10): | CATTCCAAT (SEQ ID NO: 1135) | region from TSS |
| 5,255,025- | | |
| 5,255,053 | | |
| Chr 11 | TTTAGCTAGT TTTCTTCTCC | Region 19: HBG2-330 nt |
| (NC_000011.10): | CACCATAGAA GATACCAGGA | region from TSS |
| 5,255,076- | CTTCTTTTGT CAGCCGTTTT | |
| 5,255,179 | TCACCTTCTT GTCTGTAGCT | |
| | CCAGTGAGGC CTGTAGTTTA | |
| | AAGT (SEQ ID NO: 1136) | |
| Chr 11 | GGACACGTCT TAGTCTCATT | Region 20: HBG2-500 nt |
| (NC_000011.10): | TAGTAAGCAT TGGTTTCC (SEQ ID | region from TSS |
| 5,255,255- | NO: 1137) | |
| 5,255,292 | | |
| Chr 11 | TTTTTTATAT TCAGGTATGT | Region 21: HBG2-800 nt |
| (NC_000011.10): | ATGTAGGCAC CCGATGATGT | region from TSS |
| 5,255,518- | GTATTTATCA CTGGATAAGT | |
| 5,255,641 | GTATGTGCTG GCTGATGACC | |
| | CAGGGTTTTG GTGTAGCTCT | |
| | TCTATGCTCG GTAAAGATGA TGGT | |
| | (SEQ ID NO: 1138) | |

*NCBI Reference Sequence NC_000011, the coordinates are reported using the One-based coordinate system, “Homo sapiens chromosome 11, GRCh38.p12 Primary Assembly,” (Version NC_000011.10).

TABLE 12
Cpf1 guide RNAs

| gRNA | gRNA | gRNA | | | | |
|---|---|---|---|---|---|---|
| targeting | Targeting | Targeting | Genomic | Genomic | | |
| domain | domain | domain | coordinates | coordinates | % | |
| sequence ID* | sequence (RNA) | sequence (DNA) | at HbG1** | at HbG2** | Editing | Strand |
| AsCpf1 HBG1 | AGACAGAUAU | AGACAGATAT | Chr11:5250024: | Chr11:5254948: | 5.43 | + |
| Promoter-1 | UUGCAUUGAG | TTGCATTGAG | 5250043 | 5254967 | | |
| | (SEQ ID | (SEQ ID | | | | |
| | NO: 1139) | NO: 1140) | | | | |
| AsCpf1 HBG1 | CAUUGAGAUA | CATTGAGATA | Chr11:5250037: | Chr11:5254961: | 8.30 | + |
| Promoter-2 | GUGUGGGGA | GTGTGGGGAA | 5250056 | 5254980 | | |
| | A (SEQ ID | (SEQ ID | | | | |
| | NO: 1141) | NO: 1142) | | | | |
| AsCpf1 HBG1 | UAGCCUUUGC | TAGCCTTTGC | Chr11:5250091: | Chr11:5255019: | 0.23 | + |
| Promoter-3 | CUUGUUCCGA | CTTGTTCCGA | 5250110 | 5255038 | | |
| | (SEQ ID | (SEQ ID | | | | |
| | NO: 1143) | NO: 1144) | | | | |
| AsCpf1 HBG1 | CCUUGUUCCG | CCTTGTTCCG | Chr11:5250100: | Chr11:5255028: | 1.15 | + |
| Promoter-4 | AUUCAGUCAU | ATTCAGTCAT | 5250119 | 5255047 | | |
| | (SEQ ID | (SEQ ID | | | | |
| | NO: 1145) | NO: 1146) | | | | |
| AsCpf1 HBG1 | UCUAAUUUAU | TCTAATTTATT | Chr11:5250131: | Chr11:5255059: | 0.16 | + |
| Promoter-5 | UCUUCCCUUU | CTTCCCTTT | 5250150 | 5255078 | | |
| | (SEQ ID | (SEQ ID | | | | |
| | NO: 1147) | NO: 1148) | | | | |
| AsCpf1 HBG1 | CUUCUCCCAU | CTTCTCCCATC | Chr11:5250161: | | 12.73 | + |
| Promoter-6 | CAUAGAGGAU | ATAGAGGAT | 5250180 | | | |
| | (SEQ ID | (SEQ ID | | | | |
| | NO: 1149) | NO: 1150) | | | | |
| AsCpf1 HBG2 | UUCUCCCACC | TTCTCCCACC | | Chr11:5255090: | 8.11 | + |
| Promoter-7 | AUAGAAGAU | ATAGAAGATA | | 5255109 | | |
| | A (SEQ ID | (SEQ ID | | | | |
| | NO: 1151) | NO: 1152) | | | | |
| AsCpf1 HBG1 | CCACUGGAUA | CCACTGGATA | Chr11:5250634: | | 13.33 | + |
| Promoter-8 | AGUGUGUGU | AGTGTGTGTG | 5250653 | | | |
| | G (SEQ ID | (SEQ ID | | | | |
| | NO: 1153) | NO: 1154) | | | | |
| AsCpf1 HBG1 | GCGUAGCUCU | GCGTAGCTCT | Chr11:5250677: | | 13.48 | + |
| Promoter-9 | UCUAUGCUCA | TCTATGCTCA | 5250696 | | | |
| | (SEQ ID | (SEQ ID | | | | |
| | NO: 1155) | NO: 1156) | | | | |
| AsCpf1 HBG1 | CUGAGCAUAG | CTGAGCATAG | Chr11:5250678: | | 10.73 | − |
| Promoter-10 | AAGAGCUACG | AAGAGCTACG | 5250697 | | | |
| | (SEQ ID | (SEQ ID | | | | |
| | NO: 1157) | NO: 1158) | | | | |
| AsCpf1 HBG2 | UCACUGGAUA | TCACTGGATA | | Chr11:5255565: | 0.43 | + |
| Promoter-11 | AGUGUAUGU | AGTGTATGTG | | 5255584 | | |
| | G (SEQ ID | (SEQ ID | | | | |
| | NO: 1159) | NO: 1160) | | | | |
| AsCpf1 HBG2 | GUGUAGCUCU | GTGTAGCTCT | | Chr11:5255608: | 5.78 | + |
| Promoter-12 | UCUAUGCUCG | TCTATGCTCG | | 5255627 | | |
| | (SEQ ID | (SEQ ID | | | | |
| | NO: 1161) | NO: 1162) | | | | |
| AsCpf1 HBG2 | CCGAGCAUAG | CCGAGCATAG | | Chr11:5255609: | 3.24 | - |
| Promoter-13 | AAGAGCUACA | AAGAGCTACA | | 5255628 | | |
| | (SEQ ID | (SEQ ID | | | | |
| | NO: 1163) | NO: 1164) | | | | |
| HBG1-1 | CCUUGUCAAG | CCTTGTCAAG | Chr11:5249955: | Chr11:5254879: | 17.96 | + |
| AsCpf1 | GCUAUUGGUC | GCTATTGGTC | 5249974 | 5254898 | | |
| | (SEQ ID | (SEQ ID | | | | |
| | NO: 1002) | NO: 1003) | | | | |
| AsCpf1 RR | GACAGAUAUU | GACAGATATT | Chr11:5250025: | Chr11:5254949: | 8.48 | + |
| HBG1 | UGCAUUGAGA | TGCATTGAGA | 5250044 | 5254968 | | |
| Promoter-1 | (SEQ ID | (SEQ ID | | | | |
| | NO: 1167) | NO: 1168) | | | | |
| AsCpf1 RR | ACACUAUCUC | ACACTATCTC | Chr11:5250031: | Chr11:5254955: | 0.09 | − |
| HBG1 | AAUGCAAAUA | AATGCAAATA | 5250050 | 5254974 | | |
| Promoter-2 | (SEQ ID | (SEQ ID | | | | |
| | NO: 1169) | NO: 1170) | | | | |
| AsCpf1 RR | CACACUAUCU | CACACTATCT | Chr11:5250032: | Chr11:5254956: | 2.10 | − |
| HBG1 | CAAUGCAAAU | CAATGCAAAT | 5250051 | 5254975 | | |
| Promoter-3 | (SEQ ID | (SEQ ID | | | | |
| | NO: 1171) | NO: 1172) | | | | |
| AsCpf1 RR | CCACACUAUC | CCACACTATC | Chr11:5250033: | Chr11:5254957: | 2.52 | − |
| HBG1 | UCAAUGCAAA | TCAATGCAAA | 5250052 | 5254976 | | |
| Promoter-4 | (SEQ ID | (SEQ ID | | | | |
| | NO: 1173) | NO: 1174) | | | | |
| AsCpf1 RR | UUCCCCACAC | TTCCCCACAC | Chr11:5250037: | Chr11:5254961: | 0.05 | − |
| HBG1 | UAUCUCAAUG | TATCTCAATG | 5250056 | 5254980 | | |
| Promoter-5 | (SEQ ID | (SEQ ID | | | | |
| | NO: 1175) | NO: 1176) | | | | |
| AsCpf1 RR | GAUUCAGUCA | GATTCAGTCA | Chr11:5250109: | | 0.77 | + |
| HBG1 | UUCCAGUUUU | TTCCAGTTTT | 5250128 | | | |
| Promoter-6 | (SEQ ID | (SEQ ID | | | | |
| | NO: 1177) | NO: 1178) | | | | |
| AsCpf1 RR | AUUCAGUCAU | ATTCAGTCAT | Chr11:5250110: | | 0.24 | + |
| HBG1 | UCCAGUUUUU | TCCAGTTTTT | 5250129 | | | |
| Promoter-7 | (SEQ ID | (SEQ ID | | | | |
| | NO: 1179) | NO: 1180) | | | | |
| AsCpf1 RR | GUCAUUCCAG | GTCATTCCAG | Chr11:5250115: | | 1 .00 | + |
| HBG1 | UUUUUCUCUA | TTTTTCTCTA | 5250134 | | | |
| Promoter-8 | (SEQ ID | (SEQ ID | | | | |
| | NO: 1181) | NO: 1182) | | | | |
| AsCpf1 RR | AGUUUUUCUC | AGTTTTTCTCT | Chr11:5250123: | | 0.15 | + |
| HBG1 | UAAUUUAUUC | AATTTATTC | 5250142 | | | |
| Promoter-9 | (SEQ ID | (SEQ ID | | | | |
| | NO: 1183) | NO: 1184) | | | | |
| AsCpf1 RR | GUUUUUCUCU | GTTTTTCTCTA | Chr11:5250124: | | 0.15 | + |
| HBG1 | AAUUUAUUCU | ATTTATTCT | 5250143 | | | |
| Promoter-10 | (SEQ ID | (SEQ ID | | | | |
| | NO: 1185) | NO: 1186) | | | | |
| AsCpf1 RR | GAUUCAGUCA | CAAGAGGATA | | Chr11:5254989: | *** | + |
| HBG2 | UUCCAAUUUU | CTGCTGCTTA | | 5255008 | | |
| Promoter-11 | (SEQ ID | (SEQ ID | | | | |
| | NO: 1187) | NO: 1188) | | | | |
| AsCpf1 RR | AUUCAGUCAU | AAGAGGATAC | | Chr11:5254990: | *** | + |
| HBG2 | UCCAAUUUUU | TGCTGCTTAA | | 5255009 | | |
| Promoter-12 | (SEQ ID | (SEQ ID | | | | |
| | NO: 1189) | NO: 1190) | | | | |
| AsCpf1 RR | GUCAUUCCAA | GATTCAGTCA | | Chr11:5255037: | 0.25 | + |
| HBG2 | UUUUUCUCUA | TTCCAATTTT | | 5255056 | | |
| Promoter-13 | (SEQ ID | (SEQ ID | | | | |
| | NO: 1191) | NO: 1192) | | | | |
| AsCpf1 RR | AAUUUUUCUC | ATTCAGTCAT | | Chr11:5255038: | 0.13 | + |
| HBG2 | UAAUUUAUUC | TCCAATTTTT | | 5255057 | | |
| Promoter-14 | (SEQ ID | (SEQ ID | | | | |
| | NO: 1193) | NO: 1194) | | | | |
| AsCpf1 RR | AUUUUUCUCU | GTCATTCCAA | | Chr11:5255043: | 0.32 | + |
| HBG2 | AAUUUAUUCU | TTTTTCTCTA | | 5255062 | | |
| Promoter-15 | (SEQ ID | (SEQ ID | | | | |
| | NO: 1195) | NO: 1196) | | | | |
| AsCpf1 RR | UUCUCCCAUC | AATTTTTCTCT | | Chr11:5255051: | 0.14 | + |
| HBG2 | AUAGAGGAU | AATTTATTC | | 5255070 | | |
| Promoter-16 | A (SEQ ID | (SEQ ID | | | | |
| | NO: 1197) | NO: 1198) | | | | |
| AsCpf1 RR | AUCAUAGAGG | ATTTTTCTCTA | | Chr11:5255052: | 0.10 | + |
| HBG2 | AUACCAGGAC | ATTTATTCT | | 5255071 | | |
| Promoter-17 | (SEQ ID | (SEQ ID | | | | |
| | NO: 1199) | NO: 1200) | | | | |
| AsCpf1 RR | ACCAUAGAAG | TTCTCCCATC | Chr11:5250162: | | 1.40 | + |
| HBG1 | AUACCAGGAC | ATAGAGGATA | 5250181 | | | |
| Promoter-18 | (SEQ ID | (SEQ ID | | | | |
| | NO: 1201) | NO: 1202) | | | | |
| AsCpf1 RR | CAGUACCUGC | ATCATAGAGG | Chr11:5250169: | | 7.88 | + |
| HBG1 | CAAAGAACAU | ATACCAGGAC | 5250188 | | | |
| Promoter-19 | (SEQ ID | (SEQ ID | | | | |
| | NO: 1203) | NO: 1204) | | | | |
| AsCpf1 RR | UAGUAUCUGG | ACCATAGAAG | | Chr11:5255097: | 13.03 | + |
| HBG2 | UAAAGAGCAU | ATACCAGGAC | | 5255116 | | |
| Promoter-20 | (SEQ ID | (SEQ ID | | | | |
| | NO: 1205) | NO: 1206) | | | | |
| AsCpf1 RR | UCAAUGCAAA | CAGTACCTGC | Chr11:5250714: | | 13.31 | − |
| HBG1 | UAUCUGUCUG | CAAAGAACAT | 5250733 | | | |
| Promoter-21 | (SEQ ID | (SEQ ID | | | | |
| | NO: 1207) | NO: 1208) | | | | |
| AsCpf1 RR | CUCUUGGGGG | TAGTATCTGG | | Chr11:5255645: | 4.07 | − |
| HBG2 | CCCCUUCCCC | TAAAGAGCAT | | 5255664 | | |
| Promoter-22 | (SEQ ID | (SEQ ID | | | | |
| | NO: 1209) | NO: 1210) | | | | |
| AsCpf1 RVR | GAUUCAGUCA | TCAATGCAAA | Chr11:5250023: | Chr11:5254947: | 0 .15 | − |
| HBG1 | UUCCAAUUUU | TATCTGTCTG | 5250042 | 5254966 | | |
| Promoter-1 | (SEQ ID | (SEQ ID | | | | |
| | NO: 1211) | NO: 1212) | | | | |
| AsCpf1 RVR | AUUCAGUCAU | CTCTTGGGGG | Chr11:5250051: | Chr11:5254975: | 1.09 | − |
| HBG1 | UCCAAUUUUU | CCCCTTCCCC | 5250070 | 5254994 | | |
| Promoter-2 | (SEQ ID | (SEQ ID | | | | |
| | NO: 1213) | NO: 1214) | | | | |
| AsCpf1 RVR | AAAAAAAUU | AAAAAAATTA | Chr11:5250069: | | *** | − |
| HBG1 | AGCAGUAUCC | GCAGTATCCT | 5250088 | | | |
| Promoter-3 | U (SEQ ID | (SEQ ID | | | | |
| | NO: 1215) | NO: 1216) | | | | |
| AsCpf1 RVR | GCCUUUGCCU | GCCTTTGCCTT | Chr11:5250093: | Chr11:5255021: | 3.96 | + |
| HBG1 | UGUUCCGAUU | GTTCCGATT | 5250112 | 5255040 | | |
| Promoter-4 | (SEQ ID | (SEQ ID | | | | |
| | NO: 1217) | NO: 1218) | | | | |
| AsCpf1 RVR | AAAAAAAUU | AAAAAAATTA | | Chr11:5254997: | ** | − |
| HBG2 | AAGCAGCAGU | AGCAGCAGTA | | 5255016 | | |
| Promoter-5 | A (SEQ ID | (SEQ ID | | | | |
| | NO: 1219) | NO: 1220) | | | | |
| AsCpf1 RVR | CUCAGUAAAG | CTCAGTAAAG | Chr11:5250693: | | 5.32 | + |
| HBG1 | AUGAUGGUA | ATGATGGTAG | 5250712 | | | |
| Promoter-6 | G (SEQ ID | (SEQ ID | | | | |
| | NO: 1221) | NO: 1222) | | | | |
| AsCpf1 RVR | ACUGGAUAAG | ACTGGATAAG | | Chr11:5255567: | 9.78 | + |
| HBG2 | UGUAUGUGCU | TGTATGTGCT | | 5255586 | | |
| Promoter-7 | (SEQ ID | (SEQ ID | | | | |
| | NO: 1223) | NO: 1224) | | | | |
| AsCpf1 RVR | UGCUGGCUGA | TGCTGGCTGA | Chr11:5250652: | Chr11:5255583: | 0.24 | + |
| HBG2 | UGACCCAGGG | TGACCCAGGG | 5250671 | 5255602 | | |
| Promoter-8 | (SEQ ID | (SEQ ID | | | | |
| | NO: 1225) | NO: 1226) | | | | |
| AsCpf1 RVR | CUCGGUAAAG | CTCGGTAAAG | | Chr11:5255624: | 5.75 | + |
| HBG2 | AUGAUGGUA | ATGATGGTAG | | 5255643 | | |
| Promoter-9 | G (SEQ ID | (SEQ ID | | | | |
| | NO: 1227) | NO: 1228) | | | | |
| AsCpf1 RVR | UGGUAAAGA | TGGTAAAGAG | | Chr11:5255638: | 8.55 | − |
| HBG2 | GCAUUCUACC | CATTCTACCA | | 5255657 | | |
| Promoter-10 | A (SEQ ID | (SEQ ID | | | | |
| | NO: 1229) | NO: 1230) | | | | |

*the gRNA ID name provides the particular Cpf1 molecule used in the RNP complex
**NCBI Reference Sequence NC_000011, the coordinates are reported using the One-based coordinate system, “Homo sapiens chromosome 11, GRCh38.p12 Primary Assembly,” (Version NC_000011.10).
***represents gRNAs that were not tested.

[0384] RNPs (5 μM) containing AsCpf1 protein (SEQ ID NO:1000), AsCpf1 RR protein (SEQ ID NO:1036), or AsCpf1 RVR (SEQ ID NO:1037) complexed with single gRNAs comprising gRNA targeting domains from Table 12 (see gRNA ID name for the particular Cpf1 molecule used) were delivered to mobilized peripheral blood (mPB) CD34+ cells using the Amaxa electroporator device (Lonza). After 72 hours, genomic DNA was extracted from cells and the level of insertions /deletions at the target site was then analyzed by Illumina sequencing (NGS) of the PCR amplified target site. The percentage of editing (indels=deletions and insertions) for each gRNA is shown in Table 12 above. In certain embodiments, Cpf1 RNPs comprising one or more of the gRNAs set forth in Table 12 may be used to target the regions listed in Table 11 to induce HbF expression and may be co-delivered with a “booster element” to achieve higher editing levels compared to the editing level of the Cpf1 RNP alone.

### Example 9: Co-Delivery of HBG1-1-Cpf1 RNP Targeting the CCAAT Box with ssODN Supports an Increase in Gene Editing in Human Hematopoietic Stem/Progenitor Cells

[0385] A 100 nt ssODN generating the “18 nt deletion” (HBG A-104:−121) (i.e., ssODN OLI16431 (SEQ ID NO: 1040), Table 7) was co-delivered with Cpf1 RNP to further investigate the editing outcome.

[0386] Briefly, human adult mPB CD34+ cells pre-stimulated for two days in medium supplemented with human cytokines were electroporated with RNP comprising the His-AsCpf1-sNLS-sNLS H800A protein (SEQ ID NO: 1032, Table 8) complexed to modified HBG1-1 gRNA (SEQ ID NO: 1041, Table 8) (“His-AsCpf1-sNLS-sNLS H800A_HBG1-1 RNP”) either alone at 6 μM or in combination with OLI16431 (0.5-6 μM). Co-delivery of the RNP and ssODN donor encoding the 18 nt deletion with positive strand homology arms (OLI16431) enhanced the editing frequency from 8.0% without donor to 75.6%, as determined by sequencing analysis of the HBG PCR product from genomic DNA extracted at 72 hours post-electroporation (FIG. 13A). This level of editing enabled an increase in HbF levels of ˜24% above background (FIG. 13A). Additionally, it should be noted that there was no decrease observed in cell viability (FIG. 13B) as measured by DAPI exclusion or of colony forming potential (FIG. 13C) at any of the doses tested.

### Example 10: Optimization of HBG1-1-Cpf1 RNP and OLI16431 Dosing to Maximize Editing at the RNP Targeting Distal CCAAT Box Site

[0387] Having demonstrated increased editing when co-delivering ssODN with RNP (see, e.g., Example 9), the same methodology was used to optimize the dosing of each component in order to maximize total editing. Briefly, a dosing matrix was set up with RNP comprising the His-AsCpf1-sNLS-sNLS H800A protein (SEQ ID NO:1032, Table 8) complexed to unmodified HBG1-1 gRNA (SEQ ID NO: 1022, Table 8) (“His-AsCpf1-sNLS-sNLS H800A_HBG1-1 RNP”) being co-delivered at 0-12 μM with OLI16431 (SEQ ID NO:1040, Table 7) at 0-12 μM. Using a dose of 8 μM His-AsCpf1-sNLS-sNLS H800A_HBG1-1 RNP co-delivered with 8 μM OLI16431, a maximum of 89.4% indels was achieved when measured by sequencing analysis of the HBG PCR product from genomic DNA extracted from cells following 14 days erythroid culture (FIG. 14A). This coincided with an increase in HbF levels to >32% above background under these dosing conditions (FIG. 14A). The viability of this sample (His-AsCpf1-sNLS-sNLS H800A_HBG1-1 RNP [8 μM]+OLI16431 [8 PM]) was comparable to that of the untreated control sample at both 48 hours post electroporation and after 14 days in erythroid culture (FIG. 14B).

[0388] However, an artifact was observed when >8 μM OLI16431 was electroporated into the cells alone, without RNP. Under these conditions, there was a false positive result when PCR amplification was performed 48 hour post electroporation, likely due to excessive ssODN within the system (see FIG. 14A, 8 μM and 12 μM for OLI16431 alone at 48 hours (black bars)). At lower doses of ssODN, and at later timepoints, this false positive was no longer apparent (FIG. 14A, 4 μM and 6 μM for OLI16431 alone at 48 hours (black bars) and 4 μM, 6 μM, 8 μM, and 12 μM for OLI16431 alone at 14 days (light grey bars)). In addition, the decrease in cell viability observed with the ssODN alone groups (FIG. 14B, dropping to −57% with 12 μM OLI16431 alone at 48 hours (black bars)) may be a compounding factor. That there was no false positive result at ssODN doses of 4 μM and 6 μM suggests that this artifact may be due to excessive ssODN. These factors, along with the baseline HbF levels observed with the 8 μM and 12 μM OLI16431 alone groups (FIG. 14A, grey dots as compared to negative control), provide confidence that the substantial and sustained boost in RNP editing with the addition of ssODN is real and not an artifact.

### Example 11: RNPs Containing Various Cpf1 and gRNA Targeting the HBG Promoter Region Support Gene Editing in Human Hematopoietic Stem/Progenitor Cells which Promotes Induction of HbF Protein Expression in the Erythroid Progeny

[0389] Guide RNAs comprising SEQ ID NOs:1022, 1023, 1041-1093, 1098-1106 (Table 13) were complexed to various Cpf1 variant enzymes (SEQ ID NOs:1032, 1094-1097, 1107-1109, Table 14) to form various RNP complexes (Table 15). The RNPs contained gRNAs with modifications to the 5′ end and/or modifications to the 3′ end of the gRNA (Table 13). Guide RNAs comprising SEQ ID NOs:1022, 1023, 1041-1084, 1098-1106 (Table 13) have the same expected cleavage site at the distal CCAAT box target region, the related targeting domains contain the sequences set forth in SEQ ID NO:1002 (HBG1-1), SEQ ID NO:1254 (HBG1-1-21mer), SEQ ID NO: 1256 (HBG1-1-22mer), SEQ ID NO:1258 (HBG1-1-23mer), for gRNA comprising a 20 mer, 21 mer, 22 mer, or 23 mer protospacer sequence respectively (Table 15, Table 16). In some cases gRNA targeting other positions within the HBG promoter were also tested, including guide RNAs SEQ ID NOs:1085-1096, comprising targeting domains containing the sequences set forth in SEQ ID NOs:1260 (AsCpf1 HBG1 Promoter-1 (21mer)), SEQ ID NO:1262 (AsCpf1 HBG1 Promoter-2 (21mer)) or SEQ ID NO:1264 (AsCpf1 HBG1 Promoter-6 (21mer)) (Table 16, Table 17). Table 15 provides a listing of each RNP tested in Examples 11-13 and the SEQ ID NO of the gRNA and the SEQ ID NO of the Cpf1 variant that form each RNP complex. Additional information about each gRNA and Cpf1 variant may be found in Table 13 and Table 14, respectively.

[0390] The gRNAs used in Examples 11 and 12 were chemically synthesized. Chemicals for oligonucleotide synthesis were purchased from BioAutomation, Glen Research, Millipore Sigma, Sigma-Aldrich, ChemGenes, and Thermo Fisher Scientific. The solid support used for synthesis was either a Unylinker 2000 Å CPG resin, a 2′-TBDMS rU 2000 Å CPG resin or a 2′-O-methyl adenosine (N-Bz) Icaa 2000 Å CPG resin from ChemGenes. RNA (TBDMS-protected) and DNA phosphoramidites were obtained from Thermo Fisher Scientific. In certain embodiments, phosphorothioates were introduced during a sulfurization step with a solution of DDTT (3-((dimethylamino-methylidene)amino)-3H-1,2,4-dithiazole-3-thione) from Glen Research. Oligonucleotides were synthesized using standard RNA and DNA phosphoramidite chemistry on either a BioAutomation MerMade 12 synthesizer or on a GE Akta OligoPilot 100 synthesizer. Following synthesis, the oligonucleotides were cleaved from the solid support and deprotected in a two-step process using ammonium hydroxide/methylamine and TEA-3HF. After desalting, the oligonucleotides were purified using reversed-phase chromatography on a preparative HPLC.

[0391] First, the effect of editing using RNPs comprising gRNAs with modifications to the 5′ end of the gRNAs was tested. Briefly, RNP complexes (6.0 μM and 12 μM) were delivered to 1×10⁶mPB CD34+ cells via MaxCyte electroporation, following 48 hours pre-stimulation in X-Vivo 10 media supplemented with SCF, TPO and FLT3. The level of insertions/deletions at the target site was analyzed by Illumina sequencing (NGS) of the PCR amplified target site at 72 hours after electroporation. Results demonstrate that RNPs comprising gRNAs with no modification (RNP33, also referred to as “HBG1-1-AsCpf1 RNP,” Table 8) or modifications to the 5′ end of the gRNA including the addition of 5 nt RNA (RNP37), 10 nt RNA (RNP38), 25 nt RNA (RNP39), 60 nt RNA (RNP40), 5 nt DNA (RNP41), 10 nt DNA (RNP42), 25 nt DNA (RNP43), and 60 nt DNA (RNP44) (Table 15) supports on-target editing (FIG. 15).

[0392] Next, the effect of co-delivery of Cpf1 RNP with Sp182 dead RNP (dead gRNA comprising SEQ ID NO:1027 (Table 8) complexed with S. pyogenes Cas9 (SEQ ID NO:1033)) or ssODN OLI16431 (SEQ ID NO:1040, Table 7) was tested. Briefly, a dosing matrix with RNP33 (no 5′ or 3′ gRNA modification, Table 15) complexes at varying concentrations (6 μM, 8 μM, 8 μM, and 12 PM) were co-delivered with Sp182 RNP (8 μM, 8 μM, 6 μM, and 4 μM) or ssODN OLI16431 (8 PM, 8 μM, 6 μM, and 4 μM) to 5.25×10⁶ mPB CD34+ cells via MaxCyte electroporation, following 48 hours pre-stimulation in X-Vivo 10 media supplemented with SCF, TPO and FLT3. Following electroporation, cells were placed back to culture for a further 48 hours. Then, a fraction of the CD34 cells were split for gDNA extraction and indel quantification in the bulk cell population. In addition, to investigate the editing in phenotypic progenitors and phenotypic hematopoietic stem cells (HSCs), HSPC subpopulations were characterized (amongst the remainder CD34 cells) by immune-phenotyping (Notta 2011) and separated by fluorescence Activated Cell Sorting (FACS). Immune phenotyping at 48 hours post electroporation was performed by staining cells with antibodies against hCD34, hCD38, hCD45RA, hCD90, and hCD123. Phenotypic HSCs were defined as hCD34bright hCD38 hCD90+hCD45RA−, and progenitors were defined as hCD34bright CD38+. These two populations were sorted by FACS and DNA was extracted to determine the editing levels in these sub-populations. The level of insertions/deletions at the target site was analyzed by Illumina sequencing (NGS) of the PCR amplified target. Results demonstrate that RNP33 co-delivered with the “booster elements” Sp182 RNP or ssODN OLI16431 support on-target editing (FIGS. 16A-16B) at levels higher than those observed when delivering RNP33 alone (FIG. 15).

[0393] Next, the effect of co-delivery of RNP33 (no 5′ or 3′ gRNA modification, Table 15), RNP43 (+25 DNA 5′ gRNA modification, Table 15) or RNP34 (1×PS2-OMe+1×OMe 3′ gRNA modifications, Table 15) with Sp182 dgRNA (Table 9) or ssODN OLI16431 (Table 7) was tested. Briefly, RNP33, RNP34, or RNP43 complexes (8 μM) were co-delivered with Sp182 RNP (8 μM) or ssODN OLI16431 (8 μM) to 5.25×10⁶ mPB CD34+ cells via MaxCyte electroporation, following 48 hours pre-stimulation in X-Vivo 10 media supplemented with SCF, TPO and FLT3. Following electroporation, cells were placed back to culture for a further 48 hours prior to sorting into phenotypic progenitor and phenotypic HSC fractions for indel quantification. The level of insertions /deletions at the target site was analyzed by Illumina sequencing (NGS) of the PCR amplified target site at 48 hours after electroporation. Results demonstrate that RNPs containing gRNAs with 5′ modification or 3′ modifications co-delivered with the “booster elements” Sp182 RNP or ssODN OLI16431 support on-target editing (FIG. 17). Both booster elements tested provided comparable editing levels to RNP34 and RNP33. When compared to editing levels obtained without the booster element, while RNP33 editing was enhanced by both booster elements, RNP43 editing was however only increased with the addition of Sp182 RNP (FIGS. 15, 17).

[0394] Next the effect of different Cpf1 proteins on RNP editing was tested. A stoichiometric comparison (gRNA:Cpf1) with RNPs comprising various Cpf1 proteins was performed. Briefly, RNPs (RNP64, RNP63, RNP45, Table 15) were delivered at a stoichiometry (gRNA:Cpf1 complexation ratio) of either 2 or 4, where the gRNA is in a molar excess. All RNPs were delivered via MaxCyte electroporation at 8 μM to 1×10⁶ CD34+ cells following 48 hours pre-stimulation in X-Vivo 10 media supplemented with SCF, TPO and FLT3. Following electroporation, cells were placed back to culture for a further 72 hours prior to indel quantification. Results demonstrated that there was no difference in editing rates with altered stoichiometry at the concentration tested (FIG. 18). RNP45 (comprising Cpf1 protein SEQ ID NO:1094) outperforms RNP63 (comprising Cpf1 protein SEQ ID NO:1095) and RNP64 (comprising Cpf1 SEQ ID NO: 1109).

[0395] Next, the effect of Sp182 RNP or ssODN OLI16431 co-delivery with various RNPs containing different Cpf1 proteins was tested. Briefly, RNPs (RNP33, RNP64, RNP63, RNP45, Table 15) were delivered alone or in combination with Sp182 RNP or ssODN OLI16431. All reagents were delivered via MaxCyte electroporation at 8 μM to 1×10⁶ CD34+ cells following 48 hours pre-stimulation in X-Vivo 10 media supplemented with SCF, TPO and FLT3. Following electroporation, cells were placed back to culture for a further 72 hours prior to indel quantification. Results indicate the “booster elements” Sp182 RNP or ssODN OLI16431 enhanced editing for all RNPs tested (FIG. 19).

[0396] The effect of editing using RNPs containing gRNAs with various 5′ DNA extensions, or RNP without a 5′ DNA extension (RNP45) co-delivered with or without ssODN OLI16431 was tested. Briefly, following 48 hours pre-stimulation in X-Vivo 10 media supplemented with SCF, TPO and FLT3, RNPs (RNP45 (no 5′ modification), RNP46, RNP47, RNP48, RNP49, RNP50, RNP51, RNP52, RNP53, RNP54, RNP55, RNP56, and RNP57, Table 15) at a concentration of 8 μM were delivered alone or co-delivered with 8 μM ssODN OLI16431 via MaxCyte electroporation to 1×10⁶ CD34+ cells. Following electroporation, cells were placed back to culture prior to indel quantification. Results demonstrate that all RNPs support on-target editing (FIG. 20).

[0397] The effect of editing using RNPs including gRNAs having the same 5′ DNA extension but different 3′ gRNA modifications was tested to assess the impact of 3′ gRNA modifications. Briefly, RNPs comprising gRNAs with matched 5′ ends, but different 3′ gRNA modifications (RNP49 vs. RNP58 and RNP59 v. RNP60) were delivered at a concentration of 8 μM via MaxCyte electroporation to 1×10⁶ CD34+ cells following 48 hours pre-stimulation in X-Vivo 10 media supplemented with SCF, TPO and FLT3. Following electroporation, cells were placed back to culture prior to indel quantification. In both comparisons, RNPs containing gRNA with 3′ PS-OMe outperformed the unmodified 3′ version at 24h post electroporation (FIG. 21).

[0398] Next, different concentrations of Cpf1 and gRNA for RNP58 were tested. Briefly, RNP58 (+25 DNA 5′ gRNA modification and 1×PS-OMe 3′ gRNA modification, Table 15) was delivered via MaxCyte electroporation to 1×10⁶ CD34+ cells following 48 hours pre-stimulation at a stoichiometry (gRNA:Cpf1 complexation ratio) of either 2:1, 1:1 or 0.5:1 molar ratios. Following electroporation, cells were placed back to culture prior to indel quantification. At all doses tested, editing was best when RNP was complexed at a 2:1 ratio (FIGS. 22A-22B).

[0399] The effect of editing using RNPs including gRNAs having the same 5′ DNA extension but different 3′ gRNA modifications was further tested to assess the impact of 3′ gRNA modifications. Briefly, RNPs comprising gRNAs with matched 5′ ends, but different 3′ gRNA modifications (RNP58, RNP2, RNP3, RNP4, RNPS, RNP6, RNP7, RNP8, RNP9, RNP10) were delivered at varying concentrations (1 μM, 2 μM, 4 μM) via MaxCyte electroporation to 1×10⁶ CD34+ cells following 48 hours pre-stimulation. Following electroporation, cells were placed back to culture prior to indel quantification. Results indicate that all RNPs support on-target editing (FIGS. 23A-23B).

[0400] Next, editing by RNPs that include gRNAs with 3′ gRNA modifications or 5′ and 3′ modifications that target various regions of the HBG promoter were tested. Those include guide RNAs SEQ ID NOs:1085-1096, comprising targeting domains SEQ ID NOs:1260 (AsCpf1 HBG1 Promoter-1 (21mer)), 1262 (AsCpf1 HBG1 Promoter-2 (21mer)), 1264 (AsCpf1 HBG1 Promoter-6 (21mer)) (Table 16, Table 17). Instead of the distal CCAAT box target region, those gRNAs are configured to provide an editing event within regions selected from Table 11. Briefly, RNPs including gRNAs containing an unmodified 5′ gRNA and a 1×PS-OMe 3′ gRNA modification (RNP11, RNP16, RNP19, and RNP22, Table 15), RNPs including gRNAs containing a +20 DNA +2×PS 5′ gRNA modification and a 1×PS-OMe 3′ gRNA modification (RNP12, RNP21, and RNP24, Table 15), RNPs including gRNAs containing a +25 DNA 5′ gRNA modification and a 1×PS-OMe 3′ gRNA modification (RNP58 and RNP20, Table 15) were delivered at a concentration of 8 μM via MaxCyte electroporation to 1×10⁶ CD34+ cells following 48 hours pre-stimulation in X-Vivo 10 media supplemented with SCF, TPO and FLT3. Following the editing of mPB CD34+ cells, ex vivo differentiation into the erythroid lineage was performed for 18 days (Giarratana 2011), with gDNA being isolated on day 14 of culture for indel analysis. Briefly, RNP was delivered to CD34+ cells, as described above. Following 48 hours recovery in X-Vivo 10 media supplemented with SCF, TPO and FLT3, the treated cells were counted and transferred to erythroid differentiation media, with cell counts and feeds occurring on days 4, 7, 10 and 14, with erythroid collection at day 18. These CD34+ derived erythroid cells were then counted and lysed in HPLC grade water, before filtering to removed cell debris. Then, relative expression levels of gamma-globin chains (over total beta-like globin chains) was measured for each sample by UPLC, with protein separation being achieved by gradually increasing the ratio of acetonitrile with 0.1% trifluoroacetic acid, to water with 0.1% trifluoroacetic acid (FIGS. 24A-24C). FIGS. 24A-24C showed all RNP supported on-target editing. However only editing at certain target sites give rise to increased HBF expression. The same experiment was performed with varying concentrations (0, 1 μM, 2 μM, 4 μM) of RNP58 (FIG. 25).

[0401] Next the effect of different Cpf1 proteins on RNP editing was tested. Briefly, RNP58, RNP26, RNP27, and RNP28 (Table 15) including gRNAs comprising SEQ ID NO:1051 (+25 DNA 5′ gRNA modification and a 1×PS-OMe 3′ gRNA modification, Table 13) complexed with varying Cpf1 proteins were delivered via MaxCyte electroporation at 8 μM to 1×10⁶ CD34+ cells following 48 hours pre-stimulation in X-Vivo 10 media supplemented with SCF, TPO and FLT3. Results demonstrated that all RNPs support on-target editing (FIG. 26).

[0402] Next the effect of different RNPs containing gRNAs with various 5′ gRNA modifications and the same 3′ modification was tested. Briefly, RNPs (RNP58 (+25 DNA 5′ gRNA modification and a 1×PS-OMe 3′ gRNA modification), RNP29 (+25 DNA+2×PS 5′ gRNA modification and a 1×PS-OMe 3′ gRNA modification), RNP30 (PolyA RNA+2×PS 5′ gRNA modification and a 1×PS-OMe 3′ gRNA modification), and RNP31 (PolyU RNA+2×PS 5′ gRNA modification and a 1×PS-OMe 3′ gRNA modification) (Table 15)) were delivered via MaxCyte electroporation at 1 μM, 2 μM, or 4 μM to 1×10⁶CD34+ cells following 48 hours pre-stimulation in X-Vivo 10 media supplemented with SCF, TPO and FLT3 (RNP30 was not tested at 1 μM due to availability of cells). Results demonstrated that all RNPs support on-target editing (FIG. 27).

[0403] Next the effect of different Cpf1 proteins on RNP editing was tested. Briefly, RNP58, RNP27, and RNP26 (Table 15) including gRNAs comprising SEQ ID NO:1051 (+25 DNA 5′ gRNA modification and a 1×PS-OMe 3′ gRNA modification, Table 13) complexed with varying Cpf1 proteins were delivered via MaxCyte electroporation at 2 μM or 4 μM to 1×10⁶CD34+ cells following 48 hours pre-stimulation in X-Vivo 10 media supplemented with SCF, TPO and FLT3. To investigate the editing in bulk CD34, phenotypic progenitors, and phenotypic hematopoietic stem cells (HSCs), HSPC subpopulations were characterized. Thus, following electroporation, cells were placed back to culture for a further 48 hours prior to sorting into progenitor and HSC fractions for indel quantification. The level of insertions/deletions at the target site was analyzed by Illumina sequencing (NGS) of the PCR amplified target site at 48 hours after electroporation. Results demonstrated that all RNPs support on-target editing in bulk CD34, phenotypic progenitors, and phenotypic hematopoietic stem cells (FIG. 28).

[0404] Next, the effect of co-delivery of RNP with Sp182 RNP (dead gRNA comprising SEQ ID NO:1027 (Table 8) complexed with S. pyogenes Cas9 (SEQ ID NO:1033)) or ssODN OLI16431 (SEQ ID NO: 1040, Table 7) on RNP containing different Cpf1 proteins was tested. Briefly, RNP61, RNP62, RNP34 (Table 15) were co-delivered at 8 μM with Sp182 RNP (8 μM) or ssODN OLI16431 (8 μM) to 25×10⁶mPB CD34+ cells via MaxCyte electroporation, following 48 hours pre-stimulation in X-Vivo 10 media supplemented with SCF, TPO and FLT3. To investigate the editing in bulk CD34, phenotypic progenitors, and phenotypic hematopoietic stem cells (HSCs), HSPC subpopulations were characterized. Thus, following electroporation, cells were placed back to culture for a further 48 hours prior to sorting into progenitor and HSC fractions for indel quantification. The level of insertions/deletions at the target site was analyzed by Illumina sequencing (NGS) of the PCR amplified target site at 48 hours after electroporation. Results demonstrate that RNP co-delivered with the “booster elements” Sp182 RNP or ssODN OLI16431 support on-target editing (FIG. 29). A fraction of these cells were also cryopreserved 24 hours post electroporation to be further characterized in an in vivo engraftment model (see Example 12).

[0405] Next, the effect of RNP58 and RNP32 editing was tested. Briefly, RNP58 and RNP32 (Table 15) were delivered at 2 μM to 6×10⁶ mPB CD34+ cells via MaxCyte electroporation, following 48 hours pre-stimulation in X-Vivo 10 media supplemented with SCF, TPO and FLT3. To investigate the editing in bulk CD34, phenotypic progenitors, and phenotypic HSCs, HSPC subpopulations were characterized. Thus, following electroporation, cells were placed back to culture for a further 48 hours prior to sorting into progenitor and HSC fractions for indel quantification. The level of insertions/deletions at the target site was analyzed by Illumina sequencing (NGS) of the PCR amplified target site at 48 hours after electroporation. Results demonstrate that RNP58 and RNP32 support on-target editing (FIG. 30).

[0406] RNP58 and RNP1 (Table 15) were delivered at concentrations of 2 μM to 8 μM to 25×10⁶ mPB CD34+ cells via MaxCyte electroporation, following 48 hours pre-stimulation in X-Vivo 10 media supplemented with SCF, TPO and FLT3. To investigate the editing in bulk CD34, phenotypic progenitors, and phenotypic hematopoietic stem cells (HSCs), HSPC subpopulations were characterized. Thus, following electroporation, cells were placed back to culture for a further 48 hours prior to sorting into progenitor and HSC fractions for indel quantification. The level of insertions/deletions at the target site was analyzed by Illumina sequencing (NGS) of the PCR amplified target site at 48 hours after electroporation. Results demonstrate that the RNP tested support on-target editing (FIG. 31). A fraction of these cells were also cryopreserved 24 hours post electroporation for further characterized in an in vivo engraftment model (see Example 12).

### Example 12: Infusion of Edited mPB CD34+ Cells into NOD,B6.SCID Il2rγ−/− Kit(W41/W41) Mice Results in Long Term Engraftment and HbF Induction

[0407] To determine whether delivery of RNP34 and RNP33 (Table 15) co-delivered with ssODN OLI16431 (SEQ ID NO:1040, Table 7) achieves edits in long term repopulating hematopoietic stem cells, human adult CD34+ cells from mobilized peripheral blood (mPB) were infused into nonirradiated NOD,B6.SCID Il2rγ−/− Kit(W41/W41) (Jackson lab stock name: NOD.Cg-Kit<W-41J>Tyr<+>Prkdc<scid>Il2rg<tm1Wjl>/ThomJ) (“NBSGW”) mice. Briefly, mPB CD34+ cells at 62.5×10⁶/mL were electroporated via MaxCyte electroporation with RNP at a dose of 8 μM and 6 μM ssODN OLI16431 following 48 hours pre-stimulation in X-Vivo 10 media supplemented with SCF, TPO and FLT3. After 24 hours, mCD34+ cells were cryopreserved. Five days later, mPB CD34+ cells were thawed and infused into NBSGW mice at 1 million cells per mouse via intravenous tail vein injection. Eight weeks later, mice were euthanized and bone marrow (BM) was collected from femurs, tibias, and pelvic bones. Bone marrow sub-populations of cells respectively identified as CD15+, CD19+, glycophorin A (GlyA, CD235a+), and lineage-negative CD34+ were isolated by FACS, and DNA was extracted to determine the editing levels in each of these fractions. FIG. 32 depicts the frequency of indels, as determined by next generation sequencing, of unfractionated BM, or flow-sorted individual BM sub-populations.

[0408] Next, to determine whether delivery of RNP34 or RNP33 (Table 15) co-delivered with Sp182 RNP (dead gRNA comprising SEQ ID NO:1027 (Table 8) complexed with S. pyogenes Cas9 (SEQ ID NO:1033)) achieves edits in long term repopulating hematopoietic stem cells, human adult CD34+ cells from mobilized peripheral blood (mPB) were infused into nonirradiated NBSGW mice. Briefly, mPB CD34+ cells at 62.5×10⁶/mL were electroporated via MaxCyte electroporation with RNP at varying doses and varying doses of Sp182 RNP following 48 hours pre-stimulation in X-Vivo 10 media supplemented with SCF, TPO and FLT3. After 24 hours, mCD34+ cells were cryopreserved. Five days later, mPB CD34+ cells were thawed and infused into NBSGW mice at 1 million cells per mouse via intravenous tail vein injection. Eight weeks later, mice were euthanized and bone marrow (BM) was collected from femurs, tibias, and pelvic bones. Bone marrow sub-populations of cells respectively identified as CD15+, CD19+, glycophorin A (GlyA, CD235a+), and lineage-negative CD34+ were isolated by FACS, and DNA was extracted to determine the editing levels in each of these fractions. FIG. 33A depicts the frequency of indels, as determined by next generation sequencing, of unfractionated BM, or flow-sorted individual BM sub-populations.

[0409] Lastly, long term HbF induction by BM-derived CD34+ cells was analyzed. An aliquot of BM cells were cultured under erythroid differentiation conditions for 18 days (Giarratana 2011), and evaluated for HbF expression by UPLC. Briefly, unfractionated BM cells extracted from mice 8 weeks after infusion were placed in erythroid culture conditions for 18 days. Cell counts and feeds occurred on days 7, 10 and 14, with erythroid collection at day 18. These bone marrow derived erythroid cells were then counted and lysed in HPLC grade water before filtering to removed cell debris. Then, relative expression levels of gamma-globin chains (over total beta-like globin chains) was measured for each sample by UPLC, with protein separation being achieved by gradually increasing the ratio of acetonitrile with 0.1% trifluoroacetic acid, to water with 0.1% trifluoroacetic acid (FIG. 33B). These data demonstrate that robust long-term HbF induction is achieved by RNP34 and RNP33 co-delivered with Sp182 RNP editing of human CD34+ cells.

[0410] Next, to determine whether delivery of RNP61 or RNP62 (Table 15) co-delivered with ssODN OLI16431 (SEQ ID NO: 1040, Table 7) achieves edits in long term repopulating hematopoietic stem cells, human adult CD34+ cells from mPB were infused into nonirradiated NBSGW mice. Briefly, mPB CD34+ cells at 62.5×10⁶/mL were electroporated via MaxCyte electroporation with 8 μM RNP and 8 μM ssODN OLI16431 following 48 hours pre-stimulation in X-Vivo 10 media supplemented with SCF, TPO and FLT3. After 24 hours, mCD34+ cells were cryopreserved. Four days later, mPB CD34+ cells were thawed and infused into NBSGW mice at 1 million cells per mouse via intravenous tail vein injection. Eight weeks later, mice were euthanized and bone marrow (BM) was collected from femurs, tibias, and pelvic bones. Bone marrow sub-populations of cells respectively identified as CD15+, CD19+, glycophorin A (GlyA, CD235a+), and lineage-negative CD34+ were isolated by FACS, and DNA was extracted to determine the editing levels in each of these fractions. FIG. 34A depicts the frequency of indels, as determined by next generation sequencing, of unfractionated BM, or flow-sorted individual BM sub-populations.

[0411] Lastly, long term HbF induction by BM-derived CD235a+(GlyA+) erythroid cells was analyzed. An aliquot of BM cells were cultured under erythroid differentiation conditions for 18 days and evaluated for HbF expression by UPLC. Briefly, unfractionated BM cells extracted from mice 8 weeks after infusion were placed in erythroid culture conditions for 18 days. FIG. 34B depicts the HbF expression, calculated as gamma/beta-like chains (%) by erythroid cells. These data demonstrate that robust long-term HbF induction is achieved by RNP61 and RNP62 co-delivered with ssODN OLI16431 editing of human CD34+ cells.

[0412] Next, to determine whether delivery of RNP1 or RNP58 (Table 15) achieves edits in long term repopulating hematopoietic stem cells, human adult CD34+ cells from mPB were infused into nonirradiated NBSGW mice. Briefly, mPB CD34+ cells at 62.5×10⁶/mL were electroporated via MaxCyte electroporation with 4 μM or 8 μM RNP1 or 2 μM, 4 μM, or 8 μM RNP58 following 48 hours pre-stimulation in X-Vivo 10 media supplemented with SCF, TPO and FLT3. After 24 hours, mCD34+ cells were cryopreserved. Four days later, mPB CD34+ cells were thawed and infused into NBSGW mice at 1 million cells per mouse via intravenous tail vein injection. Eight weeks later, mice were euthanized and bone marrow (BM) was collected from femurs, tibias, and pelvic bones. Human chimerism and lineage reconstitution (CD45+, CD14+, CD19+, glycophorin A (GlyA, CD235a+), lineage, and CD34+, and mouse CD45+ marker expression) in BM was determined by flow cytometry and analyzed (FIG. 35). The frequency of GlyA+ cells was calculated as GlyA+ cells/total cells in BM. Human chimerism was defined as human CD45/(human CD45+ mCD45).

[0413] Similar chimerism and lineage distributions were achieved 8-weeks post-transplant by RNP-transfected mPB CD34+ cells compared to mock-transfected mPB CD34+ cells demonstrating that editing is comparable with retaining the engraftment potential of hematopoietic stem cells. FIG. 36 depicts the indels, as determined by next generation sequencing, of unfractionated BM, at 8 weeks post-infusion. FIG. 37 shows the frequency of indel rate in BM, CD15+, CD19+, glycophorin A (GlyA, CD235a+), and lin-CD34+ cells with 2 μM, 4 μM, or 8 μM of RNP58.

[0414] Long term HbF induction by CD235a+(GlyA+) erythroid cells, derived from edited CD34+ cells was also analyzed. GlyA+ cells obtained from bone marrow, were isolated by fluorescence Activated Cell Sorting (FACS), collected and lysed in HPLC grade water. Lysates were then evaluated for HbF expression by UPLC. FIG. 38 depicts the HbF expression, calculated as gamma/beta-like chains (%) by GlyA+ cells. These data demonstrate that robust long-term HbF induction is achieved RNP58 editing of human CD34+ cells at various RNP58 concentrations.

[0415] Importantly, CD34⁺ cells that were electroporated with varying concentrations of RNP1 or RNP58 maintained their ex vivo hematopoietic activity (i.e., no difference in the quantity or diversity of erythroid and myeloid colonies compared to untreated donor matched CD34⁺ cell negative control), as determined in hematopoietic colony forming cell (CFC) assays (FIG. 39).

### Example 13: NHEJ Mediated Deletions of 4 Nucleotides or Larger at the Distal CCAAT Box Region of HBG Promoter are Maintained Long-Term and Promote Elevated HbF Expression

[0416] Delivery of RNP containing the Cas9 or Cpf1 enzyme targeting the HBG promoter region (FIG. 41A) results in the generation of a multitude of insertions and deletions (indels). These include indels derived from microhomology mediated end joining (MMEJ) and non-homologous end joining (NHEJ) repair mechanisms. As shown below, the MMEJ repair mechanism is not well utilized during editing of the long-term stem cell population (HSC) and this type of edit is lost over time.

[0417] Briefly, mPB CD34+ cells at 62.5×10⁶/mL were electroporated via MaxCyte electroporation with Sp35 RNP following 48 hours pre-stimulation in X-Vivo 10 media supplemented with SCF, TPO and FLT3. Sp35 RNP comprises Sp35 gRNA (comprising the targeting domain of SEQ ID NO:339 (i.e., CUUGUCAAGGCUAUUGGUCA (RNA)); SEQ ID NO:917 (i.e., CTTGTCAAGGCTATTGGTCA (DNA)) complexed with S. pyogenes wildtype (Wt) Cas9 protein. After 24 hours, an aliquot of mPB CD34+ cells was collected for pre-infusion (CD34) indel analysis, another aliquot was placed in erythroid differentiation for indel analysis in the progeny of erythroid progenitors. The rest of the cells were cryopreserved and stored in liquid nitrogen until the initiation of the engraftment study. At the time of infusion, mPB CD34+ cells were thawed and infused into nonirradiated NOD,B6.SCID Il2rγ−/− Kit(W41/W41) (Jackson lab stock name: NOD.Cg-Kit<W-41J>Tyr<+>Prkdc<scid>Il2rg<tm1Wjl>/ThomJ) (“NBSGW”) mice at 1 million cells per mouse via intravenous tail vein injection. Sixteen weeks later, mice were euthanized and bone marrow (BM) was collected from femurs, tibias, and pelvic bones and lineage-negative CD34+ were isolated by FACS, and DNA was extracted from cells collected at pre-infusion, in their erythroid progeny (derived in vitro) and in cells collected at 16 weeks in vivo to determine the indels (insertions/deletions) using the following primers: Forward=CATGGCGTCTGGACTAGGAG (SEQ ID NO:1266) and Reverse=AAACACATTTCACAATCCCTGAAC (SEQ ID NO:1267). The read sequence surrounding every detected deletion was analyzed to identify whether it was likely the result of DSB repair by MMEJ or NHEJ pathways. MMEJ is distinguished from NHEJ by its use of microhomology sequences. MMEJ repair relies on strand resection and annealing of proximally located repeated stretches of nucleotides (microhomologies), surrounding the DSB. The resulting deletion removes one of the microhomology sequences together with the entire intervening sequence between the two microhomologies. Thus, probable MMEJ-mediated deletion can be identified by searching for the presence of a nucleotide sequence at either end of the deleted sequence that is repeated in the region immediately flanking the other end of the deletion. Based on this, deletions were classified as “MMEJ” if stretches of 2 base pairs (bp) or more were detected at the deletion boundary and repeated in the region immediately flanking the other end of the deletion. All other deletions were classified as NHEJ.

[0418] Prior to infusion, ˜30% of indels were derived from MMEJ repair (FIG. 41B, CD34, black striped bar=MMEJ, white bar=NHEJ). In erythroid progenitors (based on indels detected after erythroid differentiation of CD34 cells), MMEJ indels represented ˜36% of indels (FIG. 41B, Prog, black striped bar=MMEJ, white bar=NHEJ). Following 16 weeks engraftment, the majority of the MMEJ indels were lost (FIG. 41B, HSC, black striped bar=MMEJ, white bar=NHEJ) with the NHEJ derived edits being maintained. This observation has also been observed by others (Bauer 2019, Wu 2019, Weber 2020), and does not appear to be site specific. It was attributed to the transition from a predominant population of actively cycling, and MMEJ-prone short-lived progenitors that constitute most of the CD34+ cells pre-infusion, to the output of more quiescent (and less MMEJ-prone) self-renewing hematopoietic stem cells (HSCs) at later timepoints in vivo. While HSCs provide hematopoietic reconstitution post-engraftment long-term, they represent a very rare population within the CD34+ bulk population pre-infusion. This finding highlights the need to use an editing tool that generates HbF-inducing indels through NHEJ-mediated repair rather than MMEJ repair to achieve durable HbF expression.

[0419] In addition, genotype to phenotype analysis at the distal CCAAT-box region of the HBG1 /2 promoters identified mutations leading to most elevated HbF expression. A single cell experiment was performed to evaluate the distribution of gamma chain expression levels in erythroid cells derived from mPB CD34+ cells edited at the distal CCAAT box region. Indels were generated at this site using either Sp35 RNP or RNP34 (Table 15)+Sp182-Cas9-RNP (FIG. 5F, Table 8). Briefly, mPB CD34+ cells at 6.25×10⁶/mL (100 μl) were electroporated via MaxCyte electroporation with 4 μM Sp35 RNP or 8 μM HBG1-1-AsCpf1H800A-RNP co-delivered with 8 μM Sp182-Cas9-RNP (all RNPs at a molar ratio of 4:1 gRNA:RNA guided nuclease) following 48 hours pre-stimulation in X-Vivo 10 media supplemented with SCF, TPO and FLT3. Sp35 RNP comprises Sp35 gRNA (comprising the targeting domain of SEQ ID NO:339 (i.e., CUUGUCAAGGCUAUUGGUCA (RNA)); SEQ ID NO:917 (i.e., CTTGTCAAGGCTATTGGTCA (DNA)) complexed with S. pyogenes wildtype (Wt) Cas9 protein. RNP34 comprises HBG1-1-AsCpf1H800A-RNP (composed of His-AsCpf1-sNLS-sNLS-H800A (SEQ ID NO:1032) complexed to HBG1-1 gRNA with a 3′ modification as shown in Table 8 (SEQ ID NO:1041)). After being left to recover for 48 hours post-electroporation, the cells were sorted by Fluorescence Activated Cell Sorting (FACS) at 1-cell/well in non-tissue culture treated 384-well plates. The cells were then differentiated and expanded clonally for 18 days into the erythroid lineage (adapted from Giarratana 2011). UPLC analysis was performed to determine the distribution of G-gamma chain expression levels (percentage of G-gamma/[total beta-like chains]) in the clonal erythroid progeny of cells derived from the total population of mPB-CD34+ cells initially edited. Sequencing analysis (allele identification and detection of indels using the following primers: Forward=CATGGCGTCTGGACTAGGAG (SEQ ID NO:1266) and Reverse =AAACACATTTCACAATCCCTGAAC (SEQ ID NO:1267)) and ddPCR (loss of 4.9 kb fragment deleting g-Gamma coding sequence) was performed on gDNA from an aliquot of each clonal culture collected on day 14, prior to enucleation, and enabled identification of clones containing only one allele coding for G-gamma, in association with a specific indel. Indels disrupting more than 3 nucleotides were generally associated with more elevated HbF expression compared to smaller indels (FIG. 41C). This finding highlights that using an editing tool that generates larger deletions at the distal CCAAT box region will provide more elevated levels of HbF expression, likely by more effectively disrupting the binding at this site of regulatory factors repressing HBG expression. Notably, most of the larger deletions evaluated were detected in clones derived from the CD34 cells edited with the Cpf1 RNP, while most of the smaller deletions evaluated were detected from clones derived from the CD34 cells edited with the Cas9 RNP (FIG. 41D), suggesting that larger indels occur more frequently with the Cpf1, leading to a potentially higher fraction of cells with elevated HbF in the erythroid progeny of CD34 cells edited with Cpf1 compared to Cas9. Consistent with this result, distribution of gamma chain expression levels (percentage of gamma chains/[total beta-like chains]) in the clonal erythroid progeny of cells derived from the total population of mPB-CD34+ cells initially edited by either the Cpf1 or Cas9 RNP showed a higher frequency of cells with high HbF in the Cpf1 sample compared to the spCas9 sample (FIG. 41E). Of the clones analyzed derived from the CD34+ cells edited with the Cpf1 RNP, 83.1% had gamma chains levels above the median level detected in erythroid clones derived from mock electroporated mPB CD34+ cells (median value=18.8%), 64.2% had gamma chains levels exceeding 30% of total beta-like and 35.8% had gamma chains levels exceeding 48.8% of total beta-like (30%+18.8% median level in control cells). Of the clones analyzed derived from the CD34+ cells edited with the Cas9 RNP, 71.4% had gamma chains levels above the median level detected in erythroid clones derived from mock electroporated mPB CD34+ cells (median value=18.8%), 49.5% had gamma chains levels exceeding 30% of total beta-like and 23.1% had gamma chains levels exceeding 48.8% of total beta-like (30%+18.8% median level in control cells).

### Example 14: Cpf1 RNP Targeting the Distal CCAAT Box Region of the HBG Promoter is Efficient at Generating Durable NHEJ Mediated Deletions of 4 Nucleotides or Larger

[0420] RNP, consisting of guide RNA targeting the distal CCAAT box region of the HBG promoter complexed with either Cpf1 or Cas9 enzyme was electroporated into mobilized peripheral blood (mPB) derived CD34+ cells using the MaxCyte GT (MaxCyte, Inc.) electroporation device. Briefly, mPB CD34+ cells at 62.5×10⁶/mL were electroporated with 4 μM Sp35 RNP (at a molar ratio of 2:1 gRNA:RNA-guided nuclease) or 8 μM RNP58 (Table 15) (at a molar ratio of 4:1 gRNA:RNA-guided nuclease) following 48 hours pre-stimulation in X-Vivo 10 media supplemented with SCF, TPO and FLT3. Sp35 RNP comprises Sp35 gRNA (comprising the targeting domain of SEQ ID NO:339 (i.e., CUUGUCAAGGCUAUUGGUCA) (RNA)); SEQ ID NO:917 (i.e., CTTGTCAAGGCTATTGGTCA) (DNA)) complexed with S. pyogenes wildtype (Wt) Cas9 protein.

[0421] The level and profile of insertions/deletions at the target site was analyzed 24 hours after electroporation. The fraction of small indels present in the samples was assessed by Illumina amplicon sequencing (ILL-seq), following library preparation method and analysis. A 15 bp window around the expected cut site was used in the analysis to calculate editing rates. The oligonucleotides and amplicon used to generate the targeted amplicon sequencing products are provided in FIG. 55A and FIG. 55B.

[0422] To characterize editing by RNP32, the indels generated in each sample were analyzed and processed. The results were summarized by looking at 1) percentage deletion for each base within the target region, 2) distribution of insertion and deletion center positions, and 3) distribution of insertion and deletion lengths. To perform these analyses, the cigar strings for the reads in the alignment bam files were processed, using the following steps:
[0423] 1) Group indels appearing in the same read.
[0424] 2) Create indel_id for indels from each read. Indel_id is a string identifying the indel, shown as indel_start_position+_+indel_length+_+ID. Where ID is NA for deletions and for insertions is the sequence inserted. See example in FIG. 55D.
[0425] 3) Group reads with the same indel_id.
[0426] 4) Count number of reads with the same indels and calculate their total fractions (including wt) and fractions in indels (excluding wt). Fractions in indels allow for a comparison between samples when they have different amounts of total editing.

[0427] Deletions were classified as “MMEJ” if stretches of 2 base pairs or more were deletion boundary and repeated in the region immediately flanking the other end of the deletion. All other deletions were classified as NHEJ. Table 24 shows the indels detected in the samples edited by RNP58 or Sp35 RNP.

[0428] Delivery of RNP containing the Cas9 or Cpf1 enzyme targeting the HBG promoter region (FIG. 41A) results in the generation of a multitude of insertions and deletions (indels). Different enzymes have different mechanistic properties; including relative to their engagement with the DNA target site and their cleavage activity, and leave different DNA ends that impact the repair outcome (Sternberg 2014, Strohkendl 2018, Swarts 2018). Notably, Cpf1 editing results in a four nucleotide 5′ overhang, which is quite different from the blunt ends of SpCas9 edits (see FIG. 41A). Evaluation of the editing profile mediated by a Cpf1 and Cas9 RNP targeting the distal box (RNP58 and Sp35RNP, respectfully) showed that indels generated by both enzymes were generally centered at the distal CCAAT box region (FIG. 42H), and the most commonly deleted base was at position TSS:−113 for both RNPs (FIGS. 42E and 42F). However, evaluation of individual indels, as defined by their position relative the HBG-TSS, length, and sequence in the case of insertions, demonstrates differences in the editing outcome after editing this site with the SpCas9 or Cpf1 RNP. FIGS. 42C and 42D show the top 20 indels generated by the Cpf1 and Cas9 RNP, respectively. The most abundant indel generated by Cas9 was the MMEJ-meditated 13 bp deletion 157_-13NA (HBG1/2 c.−102 to −114, Table 24), more commonly known as the 13 bp HPFH deletion, detected at 31.88% in the Cas9 sample compared to 3.36% in the Cpf1 sample (FIGS. 42D and 42C, respectively). The most abundant indel generated by Cpf1, was the MMEJ mediated 18 nt deletion 159_-18_NA (HBG1/2 c.−104 to −121, Table 24), which was detected at 18.53% in the Cpf1 sample compared to 1.35% in the Cas9 sample (FIGS. 42C and 42D, respectively). The five most common NHEJ indels detected in each sample were deletions of 3 to 7 bp in length for the Cpf1 sample and were deletions of 1 to 4 bp and a 1 bp insertion for Cas9 (FIGS. 42C and 42D, respectively). The full list of indels detected at >0.1% in any of the two samples is shown in Table 24.

[0429] While most indels detected at >0.1% in any of the two samples were also detected in the other sample (above or below 0.1%), their relative frequencies amongst all indels were different depending on the enzyme (Table 24 and FIG. 42I). Notably, insertions were detected at 14.09% in the Cas9 (Sp35 RNP) sample but were rarely detected in the Cpf1 (RNP58) sample (0.47%). Also, larger indels were enriched in CD34 cells edited with the Cpf1 RNP (RNP58) compared to the Cas9 RNP (Sp35 RNP) (FIG. 42J). FIG. 42G shows the distribution of indel length generated by each RNP, and FIG. 42A shows the distribution of indel length generated by each RNP for indels categorized as NHEJ-mediated. Most indels generated by Cpf1 were larger than 3 bp (FIG. 42G), which was shown to be associated with more elevated HbF in erythroid cells (FIG. 41C). Cas9 also generated deletions larger than 3 bp, however, those were primarily generated via the MMEJ repair pathway, which are expected to be less frequently observed in vivo after infusion, as this repair pathway is poorly utilized by the rare population of HSC within the CD34+ cells. NHEJ is the major repair pathway utilized by HSC (FIG. 41B), thus evaluation of the NHEJ-mediated indel profile provides information on the type of indels that are expected to be maintained in vivo at long-term after infusion of CD34+ cells.

[0430] When compared to Cas9 RNP (Sp35 RNP), the Cpf1 RNP (RNP58) showed a shift to larger NHEJ mediated indels (FIG. 42A), with the most commonly observed NHEJ indel length being 1 bp for Cas9 compared to 5 bp for Cpf1, indicating a more favorable CD34+ cells editing profile by Cpf1 for both robust and durable induction of HbF.

[0431] The percentage of >3 bp NHEJ mediated indels, >3 bp MMEJ mediated indels, and ≤3 bp indels at the distal CCAAT box resulting from editing by RNP58 (Cpf1) or Sp35 RNP (Cas9) is shown in FIG. 42B (indels generated by SpCas9 (left pie chart): NHEJ >3 bp=21.42%; ≤3 bp=48.84%; MMEJ >3 bp=29.74%; indels generated by RNP58 (right pie chart): NHEJ >3 bp=64.86%; ≤3 bp=11.11%; MMEJ >3 bp=24.02%). Cas9 (Sp35 RNP)-edited cells comprised a large fraction of small indels less than 3 bp in length, and indels >3 bp in length (associated with highest levels of HbF) were largely mediated by the MMEJ pathway (FIG. 42B). Instead, close to 90% of indels mediated by Cpf1 (RNP58) were >3 bp in length, approximately two third of those mediated by NHEJ (FIG. 42B), suggesting that the high fraction of indels >3 bp in length is expected to be maintained at long term in vivo, and the ratio of MMEJ-mediated indels is reduced in favor of NHEJ-mediated indels (FIG. 41B). Taken together, this highlights that the most durable NHEJ mediated indels are productive (>3 bp) with RNP58, whereas Sp35 RNP produces a much lower fraction of productive indels, many of which are not durable (MMEJ meditated). This demonstrates that RNP58 is an advantageous editing tool that generates HbF-inducing indels through NHEJ-mediated repair rather than solely via MMEJ repair to achieve durable HbF expression.

### Example 15: Infusion of RNP32 Edited mPB CD34+ Cells into NOD,B6.SCID Il2rγ−/− Kit (W41/W41) Mice Results in Long Term Engraftment, Indel Maintenance, and High HbF Induction

[0432] To determine whether RNP32 achieves edits in long term repopulating hematopoietic stem cells, human adult CD34+ cells from mobilized peripheral blood (mPB) were infused into nonirradiated NOD,B6.SCID Il2rγ−/− Kit(W41/W41) (Jackson lab stock name: NOD.Cg-Kit<W-41J>Tyr<+>Prkdc<scid>Il2rg<tm1Wjl>/ThomJ) (“NBSGW”) mice. Briefly, mPB CD34+ cells at 62.5×10⁶/mL were electroporated via MaxCyte electroporation with 6 μM RNP32 (Table 15) (at a molar ratio of 2:1 gRNA:RNA guided nuclease) or buffer only (“Mock”) following 48 hours pre-stimulation in X-Vivo 10 media supplemented with SCF, TPO and FLT3. After a further 24 hours, mCD34+ cells were cryopreserved. A portion of the cells was placed in in vitro culture for up to 72h post-electroporation and gDNA collected every day for indel analysis. On the day of infusion, mPB CD34+ cells were thawed and infused into NBSGW mice at 1 million cells per mouse via intravenous tail vein injection. Sixteen weeks later, mice were euthanized and bone marrow (BM) was collected from femurs, tibias, and pelvic bones.

[0433] Genomic DNA was isolated from both the pre-infused CD34+ cells (24-72 hours post electroporation) and from the bone marrow following 16 weeks engraftment. At 24 hours post electroporation, approximately 92% indels were achieved, as measured by Illumina sequencing of the on-target PCR product using the following primers: Forward=CATGGCGTCTGGACTAGGAG (SEQ ID NO: 1266) and Reverse=AAACACATTTCACAATCCCTGAAC (SEQ ID NO:1267).

[0434] Analysis of the indel length distribution and classification of indels of length <3 bp, and of indels of length >3 bp either categorized as MMEJ or NHEJ mediated indels, was conducted on the preinfusion cell population after 24h to 72h of in vitro culture post-electroporation. Deletions were classified as “MMEJ” if stretches of 2 base pairs (bp) or more were detected at the deletion boundary and repeated in the region immediately flanking the other end of the deletion. All other deletions were classified as NHEJ.

[0435] The distribution of indel length, shown in FIGS. 43 H-K, and for NHEJ-indels only in FIGS. 43D-G), was very similar across all timepoints (FIGS. 43D and 43K). Insertions were rarely detected, and the most commonly observed deletion size was −18, which notably corresponds to the size of the 18 bp MMEJ deletion HBG1/2 c.−104 to −121 and is the most frequent repair outcome after editing this site with Cpf1 (FIGS. 42C, 57, Table 25). The most commonly observed deletion size amongst NHEJ indels was 5 bp as shown in FIGS. 43 D-G.

[0436] At all timepoints, indels of size larger than 3 bp, which were observed to be associated with the highest levels of HbF induction (FIG. 41C), represented close to 90% of all indels (FIG. 43A-C). About two thirds of those were mediated by NHEJ, suggesting that the high fraction of indels >3 bp length is expected to be maintained at long term in vivo, where the ratio of MMEJ-mediated indels is reduced in favor of NHEJ-mediated indels (FIG. 41B).

[0437] Following 16 weeks engraftment, ˜96% indels were measured demonstrating indel maintenance within the long term repopulating CD34+ cells (FIG. 43A).

[0438] Next, sub-populations of cells within the bone marrow were identified via FACS analysis to determine levels of multilineage engraftment. Human chimerism and lineage reconstitution (CD45+, CD15+, CD19+, glycophorin A (GlyA, CD235a+), lineage, and CD34+, and mouse CD45+ marker expression) in BM was determined by flow cytometry and analyzed. The frequency of GlyA+ cells was calculated as GlyA+ cells/total cells in BM. Human chimerism was defined as human CD45/(human CD45+mCD45). Analysis revealed a high level of human chimerism, with no difference compared to mock electroporated cells. Greater than 90% human chimerism was achieved in both the mock and RNP32 edited groups of mice (FIG. 43M). In addition, comparable reconstitution of the B-cell, neutrophil, erythroid, and CD34+ cell lineages was observed in mice infused with RNP32 or Mock electroporated cells (FIG. 43M).

[0439] Long term HbF induction by CD235a+(GlyA+) erythroid cells, derived from RNP32 edited CD34+ cells was also analyzed. GlyA+ cells obtained from bone marrow were stained for gamma globin expression and analyzed via flow cytometry. The edited cells demonstrated pancellular distribution with ˜90% of cells being F positive (FIG. 43N). In addition, the GlyA+ cell population was isolated by Fluorescence Activated Cell Sorting (FACS), collected and lysed in HPLC grade water. Lysates were then evaluated for HbF expression by UPLC. FIG. 43O depicts the HbF expression within the GlyA+ population, which exceeded 50%, calculated as gamma/beta-like chains (%) by GlyA+ cells.

[0440] These data demonstrate that robust long-term HbF induction is achieved with RNP32 editing of human CD34+ cells. In addition, RNP32 editing does not negatively impact the engraftment and lineage reconstitution capacity of CD34+ cells.

### Example 16: Infusion of RNP32 Edited mPB CD34+ Cells into NSG (NOD-SCID Il2rγ^{Null}) Mice Demonstrates a Highly Polyclonal and Stable Engraftment of Edited Cells Over 20 Weeks with No Clonal Outgrowth

[0441] To determine whether indels derived from RNP32 (Table 15) maintain a polyclonal profile longitudinally, human adult CD34+ cells from mobilized peripheral blood (mPB) were infused into nonirradiated NSG (NOD-SCID Il2rγ^{Null}) (Jackson lab stock name: NOD.Cg-Prkdc^{scid} I12rg^{tmlWjl}/SzJ (“NSG”) mice. Briefly, mPB CD34+ cells at 62.5×10⁶/mL were electroporated via MaxCyte electroporation with 6 μM RNP32 or buffer only (“Mock”) following 48 hours pre-stimulation in X-Vivo 10 media supplemented with SCF, TPO and FLT3. After a further 24 hours, mCD34+ cells were cryopreserved. On the day of infusion, mPB CD34+ cells were thawed and infused into busulfan treated NSG mice at 5 million cells per mouse via intravenous tail vein injection. Blood was collected from mice via tail snips at 8, 12, 16, and 20 weeks post infusion and gDNA was isolated. Indel profile analysis was performed on these samples, along with the pre-infusion CD34+ cell product (24 hours post electroporation) to track maintenance of polyclonality. The following primers were used to detect indels: Forward=CATGGCGTCTGGACTAGGAG (SEQ ID NO:1266) and Reverse=AAACACATTTCACAATCCCTGAAC (SEQ ID NO:1267). No notable clonal outgrowth occurred in any of the mice analyzed demonstrating maintenance of a diverse indel profile over a 20 week period (FIG. 44A). In addition, at 20 weeks post engraftment, mice were euthanized and bone marrow (BM) was collected from femurs and tibias. Genomic DNA was isolated and indel profile analysis was performed using the primers described above. As seen in the peripheral blood, a diverse array of indels was observed (FIG. 44B). This demonstrates that hematopoiesis was reconstituted by a large number of edited hematopoietic stem cells, indicating that the RNP mediated gene modification did not impair the capacity of HSC within the edited CD34 cell population to engraft and self renew in vivo. In addition, no clonal outgrowth was observed suggesting that no cells with uncontrolled proliferation of tumorigenic potential was generated following the modification of the CD34 cells by the RNP. Emergence of a dominant clone would be a potential indication of uncontrolled proliferation or tumorigenesis, which is not seen with RNP32 editing.

### Example 17: Use of RNP32 for the Treatment of Sickle-Cell Disease

[0442] As described herein, an autologous cell therapy for sickle cell disease (SCD) can be developed that comprises CD34+ cells from patients with SCD that are edited with a AsCas12a (Cpf1) RNP at the HBG1 and HBG2 promoters to induce the expression of anti-sickling fetal hemoglobin. This autologous cell therapy is a therapeutic approach to SCD to promote the expression of anti-sickling fetal hemoglobin by directly targeting the promoter of the HBG1 and HBG2 genes which encode for the fetal gamma globin chains (FIG. 45).

[0443] The efficiency of RNP32 editing for such a cell therapy was determined using CD34+ cells obtained from three independent normal adult donors and four SCD patient donors and compared. Seven batches of mobilized peripheral blood CD34+ cells were used in two independent experiments (Table ).

TABLE 19
CD34+ cell batches

| | | Donor Mobilization |
|---|---|---|
| Cell Batch ID | Donor Type | Regimen |
| CEL021-014 | Normal | G-CSF and plerixafor |
| CEL042-001 | Normal | G-CSF |
| CEL238-001 | Normal | G-CSF and plerixafor |
| CEL211-001 | SCD | Plerixafor |
| CEL239-001 | SCD | Plerixafor |
| CEL240-001 | SCD | Plerixafor |
| CEL241-001 | SCD | Plerixafor |

Normal donor type cells were obtained as leukopaks from Hemacare and enriched using the CliniMACS Plus system. SCD CD34+ cells were shipped frozen on dry ice from NIH and University of California, San Francisco. All vials were stored in liquid nitrogen vapor phase until ready for experiments.

[0444] Briefly, CD34+ cells from normal or SCD donors were pre-stimulated in media consisting of X-Vivo 10, supplemented with 1× Glutamax, 100 ng/mL stem cell factor (SCF), 100 ng/mL thrombopoietin (TPO), and 100 ng/mL FMS-like tyrosine kinase 3 ligand (Flt3L) for 2 days in a humidified incubator at 37° C., 5% carbon dioxide (CO2). After 2 days of culture, cells were collected and resuspended in MaxCyte electroporation buffer. RNP32 (6 μM, at a gRNA/protein molar ratio of 2) was delivered to CD34+ cells via a MaxCyte GT electroporation device. 1×10⁶ to 6.25×10⁶ cells can be used per OC-100 cartridge for electroporation. However, due to the limited number of cells available from SCD donors, 0.4×10⁶ to 1×10⁶ cells from each batch were used for electroporation (FIG. 46B). Pre-warmed complete media was then added to the cells to give a final cell density of approximately 1×10⁶ cells/mL (assuming approximately 10% cell loss during processing). The electroporated cells, along with untreated control cells (cells that did not undergo electroporation), were then placed in a humidified incubator at 37° C., 5% CO₂. At Days 1, 2, and 3 post-electroporation, an aliquot of cells was counted to determine viability and cells were harvested for further analyses.

[0445] Comparable viabilities were obtained between normal and SCD CD34+ cells treated with RNP32 at Days 1 to 3 post-electroporation (FIG. 46A, FIG. 46B). The two samples with the lowest viability (one SCD and one normal donor CD34+ cells) coincided with low cell numbers used at electroporation (FIG. 46B).

[0446] Electroporated CD34+ cells were resuspended in Quick Extract at a concentration of 2,000 to 4,000 cells/μL. Crude genomic deoxyribonucleic acid (gDNA) extraction was conducted by subjecting the lysate to the following conditions in a thermocycler: 15 min at 65° C. followed by 10 min at 95° C. Crude gDNA was then analyzed for indels by next generation sequencing using the following primers: Forward=CATGGCGTCTGGACTAGGAG (SEQ ID NO: 1266) and Reverse=AAACACATTTCACAATCCCTGAAC (SEQ ID NO: 1267). RNP32 edited normal donor CD34+ cells as efficiently as SCD CD34+ cells (FIG. 47A, FIG. 47C). The indel levels were variable at Day 1 post electroporation (normal, 40.07% to 84.39%; SCD, 46.78% to 79.50%) but increased to approximately 90% by Day 3 post electroporation in both normal (83.13% to 97.17%) and SCD CD34+ cells (83.04% to 95.78%) (FIG. 47C, FIG. 47B (Day 3)). The variable levels of editing observed at Day 1 was likely related to the low number of cells used in this experiment, which was limited by the availability of cells from SCD donors as described above.

[0447] RNP32 recognizes both HBG1 and HBG2 promoters. Cleavage at both sites can lead to the deletion of the 4.9 kb intervening sequence. To assess the frequency of the 4.9 kb deletion, two ddPCR assays were designed, on-target amplicon and reference amplicon (FIG. 48A). The relative positions of the primers and probes are shown in FIG. 48A and the sequences are provided in FIG. 48B. For each sample, approximately 1.1 ng of gRNA was added to a droplet generator (BioRad) in a PCR plate and droplets were generated following manufacturers instruction. The plate was then moved to the thermocycler and the following protocol was run: 1 cycle of 10 min at 98° C., 40 cycles of 30 seconds at 94° C. and 2 min at 94° C., followed by 1 cycle of 10 min at 98° C. and hold at 4° C. Afterward, the plate was moved to the droplet reader (BioRad) for quantification and counting of droplets that are; a) Negative, b) Positive for both the on-target amplicon and reference amplicon, c) Positive for on-target only, d) Positive for reference only. To determine the percentage of 4.9 kb deletions, the following equation was applied to each sample.

$$\% 4.9 kb deletion = \frac{conc . reference - \frac{conc . on target}{Reference correction factor *}}{conc . reference} \times 100$$

[0448] *Reference correction factor was calculated as an average of [(on target concentration)/(reference concentration)] of the control samples.

[0449] The on-target editing by RNP32 also resulted in the deletion of the 4.9 kb fragment between the HBG1 and HBG2 promoters, which occurred at a frequency of approximately 27% of the beta globin loci in both normal (16.4% to 38.5%) and SCD CD34+ cells (20.7% to 32.4%) at Day 1 post-electroporation (FIG. 49A, FIG. 49B).

[0450] Erythroid progeny of normal and SCD CD34+ cells were also characterized and the ability of RNP32-edited CD34+ cells to differentiate into erythroid cells was determined. Briefly, at Day 1 post-electroporation (described above), 120,000 cells were cultured in erythroid-inducing media to generate erythroid cells using a modified three-step differentiation protocol developed by Giarratana and colleagues (Giarratana, 2005). CD34+ cells were cultured for 7 days in Step-1 media consisting of Iscove's modified Dulbecco's medium (IMDM) supplemented with 1× GlutaMAX (Gibco), 100 U/mL penicillin, 100 mg/mL streptomycin, 5% human AB+ plasma, 330 μg/mL human holo transferrin, 20 mg/mL human insulin, 2 U/mL heparin, 1 μM hydrocortisone, 3 U/mL recombinant human erythropoietin (EPO), 100 ng/mL SCF, and 5 ng/mL interleukin (IL)-3. On Day 7, cells were transferred to Step-2 media, which was identical to Step-1 media except the absence of hydrocortisone and IL-3 and cultured for 4 days. Next, cells were cultured for 7 days in Step-3 media, which was similar to Step-2 media but without the addition of SCF, and 5% human AB+ plasma was replaced with 5% KnockOut Serum Replacement (Gibco). At the end of the 18-day culture, 10 μL of cells were stained with 90 μL of erythroid fluorescence activated cell sorting (FACS) master mix for 15 min at 4° C. and acquired on a Guava easyCyte 12HT flow cytometer to determine enucleation frequency. Up to 120 mL cell suspension per sample was spun down at 500× g for 5 min to reduce the total volume of each sample down to 20 mL. Cell suspension was then passed through Acrodisc WBC syringe filters to remove nucleated cells and the resultant RBCs were used for further analyses in the experiments set forth in this example.

[0451] When placed under erythroid-inducing conditions, normal and SCD CD34+ cells (RNP32-edited cells and unedited cells), underwent robust expansion, averaging 23,000 fold across all experimental groups in 18 days (FIGS. 50A, Table 20). By Day 18, the culture consisted of erythroblasts, RBCs, and extruded nuclei (pyrenocytes) (data not shown). Approximately 80% of the erythroid cells across all groups reached terminal maturation and lost their nucleus (FIG. 50B). In summary, comparable fold expansion and terminal maturation were achieved by normal and SCD CD34+ cells with or without RNP32 electroporation.

TABLE 20
Phenotype characterization of erythroid progeny of CD34+ cells

| | | | | | | | HbF+ |
|---|---|---|---|---|---|---|---|
| Experiment | | Donor | | Fold | Enucleation | HbF | cells |
| ID | Donor Lot | Type | Treatment | Expansion | (%) | (%) | (%) |
| SCD011 | CEL211-001 | SCD | untreated | 12465 | 77.42 | 16.54 | |
| | | | RNP32 | 15118 | 75.61 | 48.63 | |
| | CEL238-001 | Normal | untreated | 25814 | 83.62 | 17.97 | |
| | | | RNP32 | 16674 | 81.77 | 39.24 | |
| SCD014 | CEL240-001 | SCD | untreated | 11686 | 80.57 | 25.84 | 71.27 |
| | | | RNP32 | 12856 | 78.30 | 58.99 | 94.50 |
| | CEL241-001 | SCD | untreated | 16793 | 83.21 | 17.26 | 58.65 |
| | | | RNP32 | 16937 | 84.72 | 53.70 | 93.45 |
| | CEL239-001 | SCD | untreated | 19732 | 76.43 | 18.25 | 50.09 |
| | | | RNP32 | 20540 | 76.79 | 51.03 | 93.29 |
| | CEL211-001 | SCD | untreated | 27390 | 80.06 | 27.92 | 64.51 |
| | | | RNP32 | 35845 | 81.21 | 58.71 | 93.79 |
| | CEL238-001 | normal | untreated | 16214 | 78.15 | 16.36 | 58.23 |
| | | | RNP32 | 29239 | 81.70 | 51.60 | 92.92 |
| | CEL021-014 | normal | untreated | 21498 | 87.12 | 11.08 | 37.76 |
| | | | RNP32 | 27659 | 86.71 | 38.38 | 90.61 |
| | CEL042-001 | normal | untreated | 26615 | 69.14 | 10.49 | 45.00 |
| | | | RNP32 | 53774 | 80.08 | 43.83 | 93.85 |

The enucleation rate was calculated as proportion of NucRed-cells (RBC) within CD235+ (erythroid) population.

[0452] HbF induction in the erythroid progeny of normal and SCD CD34+ cells post-editing by RNP32 was also characterized and a globin chain analysis was performed. Expression of various hemoglobin subunits was analyzed using reverse phase ultra-performance liquid chromatography (RP-UPLC) modified from a method described by Masala and Manca (Masala 1994)). 1×10⁶ cells post filtration from erythroid differentiation described above were washed once with phosphate buffered saline (PBS)-0.5% bovine serum albumin (BSA), and then lysed in 50 μL liquid chromatography-mass spectrometry (LC-MS) grade water. Samples were loaded onto the Agilent 1290 UPLC system. Elution was followed at 220 nm with no reference wavelength. The globin chains were eluted in the following order: β, α, AγT (a common Aγ variant, gene product of HBG1), Gγ (gene product of HBG2), and Aγ (gene product of HBG1). Area under the curve under each peak approximated the relative abundance of each globin chain and was used to calculate the level of HbF. As HbA is composed of α2β2 and HbF is composed of α2γ2, the level of HbF expression was calculated as (Aγ+Gγ)/(Aγ+Gγ+β) (%), or (AγT+Aγ+Gγ)/(AγT+Aγ+Gγ+β) (%), labelled as γ/β-like (%).

[0453] The frequency of HbF+ cells (HbF-expressing cells) in RBCs following filtration was determined using a method described by Thorpe (Thorpe 1994). In brief, the RBCs from the erythroid differentiation described above were fixed with 4% formaldehyde, permeabilized with ice-cold acetone, washed with PBS-0.5% BSA, and stained with HbF+ cell FACS master mix. Cells were washed with PBS-0.5% BSA, resuspended in PBS 0.5% with NucRed (2 drops/mL) and acquired on the Guava flow cytometer.

[0454] Erythroid cells derived from normal and SCD CD34+ cells electroporated with RNP32 demonstrated elevated, and pancellular HbF expression. An average of 43.26% HbF was measured in the treated normal donor group (38.38% to 51.60%), and 54.21% HbF in the treated SCD donor group (48.63% to 58.99%), significantly increased from a background of 13.98% (10.49% to 17.97%) and 21.16% (16.54% to 27.92%) in the untreated normal donor group and SCD donor group, respectively (FIG. 51A, Table 20). In addition, on average >92% of RBCs derived from RNP32-electroporated CD34+ cells of either donor type (normal or SCD donors) were HbF+(normal, 90.61% to 93.85%; SCD, 93.29% to 94.50%) (FIG. 51B, Table 20), which was significantly elevated compared to RBCs derived from respective untreated CD34+ cells (normal, 37.76% to 58.23%; SCD, 50.09% to 71.27%). Thus, high RNP32 editing levels resulted in elevated HbF levels after in vitro erythroid differentiation, with over 50% of HbF measured in RNP32-derived red blood cells (FIG. 51C).

[0455] Several assays were conducted to demonstrate the clinical relevance of the elevated fetal hemoglobin in untreated sickle cell patient cells, and to a lesser extent the untreated cells from normal donors, as shown in FIG. 51B. Due to the in vitro culture used to differentiate the CD34+ cells into RBCs to conduct those assays, there is a high background of HbF in untreated cells derived from SCD patients. This is expected with these culture conditions, and has been previously reported by Métais et al. (Métais 2019). This likely partially masks the full extent of the benefit achieved in modified cells when compared to unmodified cells.

[0456] To evaluate the impact of HbF induction on the sickling of RBCs as a result of hypoxia-induced HbS polymerization, untreated RBCs derived from unedited SCD CD34+ cells (unedited control cells) and RBCs derived from edited SCD CD34+ cells were incubated with oxygen scavenger sodium metabisulfite solution to remove oxygen from the cell suspension, thereby placing the cells under extremely reduced oxygen tension. The percentage of sickled RBCs derived from unedited SCD CD34+ cells and sickled RBCs derived from RNP-32 edited SCD CD34+ cells was then determined and compared.

[0457] Briefly, cells were first induced to generate erythroid cells. One million RNP32-edited RBCs were collected from the erythroid differentiation assay as described above and washed with PBS-0.5% BSA. The cell pellet was then resuspended in 20 μL PBS and mixed with 20 μL of 2% sodium metabisulfite weight/volume in water. One drop (approximately 20 μL) of this cell mix was then placed on a microscopic slide, covered with a coverslip and the edges were sealed. Slides were stored at room temperature for 1 to 4 hours before imaging and analyzing for morphological changes. Average sickling frequency reduced from 38.3% in untreated SCD RBCs (having a mean HbF of 19.9%) to 10.6% in RNP32-edited SCD RBCs (having a mean HbF of 53.8%), representing an approximate 4-fold decrease in sickling morphology for RNP32-edited RBCs from SCD patients compared with unedited RBCs from SCD patients (FIG. 52). Sodium meta-bisulfite leads to extreme hypoxia, below levels commonly observed physiologically, thus even lower percentage of sickling RBC is expected in vivo from the edited cells.

[0458] The deformability of SCD RBCs was also evaluated. To evaluate whether HbF induction decreases the rigidity and improves the deformability of SCD RBCs when deoxygenated, untreated RBCs from patients with SCD and RNP32-edited RBCs from SCD patients were analyzed on a Lorrca ektacytometer where shear stress was applied under decreasing oxygen tension (FIG. 53A). Fifteen million RBCs following filtration from erythroid differentiation (as described above) were collected and washed with PBS-0.5% BSA. Cells were centrifuged at 500×g for 5 minutes, resuspended in 1.5 ml of OXY ISO solution (Lorrca), and mixed gently by inversion. Cell suspension was then loaded onto the Lorrca ektacytometer where Oxygenscan was performed per manufacturer's instructions to measure the deformability of RBCs under shear stress when deoxygenated. RBC deformability was expressed as elongation index (EI) (FIG. 53A) and “point of sickling” represented the relative oxygen pressure when the SCD RBCs started to sickle and lost >5% of the EI during deoxygenation. Normal RBCs containing healthy adult hemoglobin (HbA and HbF) from three different donors were not impacted by the reduction in oxygen tension (FIG. 53B). In contrast, SCD RBCs from four donors became rigid when deoxygenated, as illustrated by the gradual decrease in elongation index corresponding with oxygen depletion (FIG. 53C (black line)). SCD RBCs derived from RNP32-edited CD34+ cells started to sickle at lower oxygen tension (represented as the point of sickling) compared to RBCs from untreated CD34+ cells (FIG. 53C (grey line), 53D, Table 21). In addition, deoxygenated RNP32-treated SCD RBCs remained more flexible than untreated SCD RBCs as demonstrated by the higher minimum elongation index observed for RNP32-treated SCD RBCs relative to untreated SCD RBCs (FIG. 53E, Table 21).

TABLE 21
Summary of deformability assessment of RBCs

| | | | | Point of | |
|---|---|---|---|---|---|
| | | | | Sickling | Minimum |
| Experiment | Donor | Donor | | (pO2, | Elongation |
| ID | Lot | Type | Treatment | mmHg) | Index |
| SCD011 | CEL211- | SCD | untreated | 60.17 | 0.085 |
| | 001 | | RNP32 | 35.11 | 0.260 |
| SCD014 | CEL240- | SCD | untreated | 38.55 | 0.187 |
| | 001 | | RNP32 | 21.80 | 0.340 |
| | CEL241- | SCD | untreated | 31.18 | 0.292 |
| | 001 | | RNP32 | 11.80 | 0.399 |
| | CEL239- | SCD | untreated | 53.60 | 0.104 |
| | 001 | | RNP32 | 50.09 | 0.238 |
| | CEL211- | SCD | untreated | 41.62 | 0.156 |
| | 001 | | RNP32 | 21.27 | 0.330 |

[0459] Next, to assess whether the reduced sickling and increased flexibility of SCD RBCs derived from RNP32-edited CD34+ cells would lead to improved rheological behavior, RBCs were evaluated using a microfluidic platform. The microfluidic platform replicated blood flow in the microvasculature for direct observation of the bulk flow of cultured SCD RBCs under varying oxygen conditions. When deoxygenated, the intracellular polymerization of HbS makes RBCs inflexible and rigid which translates to a drop in the velocity through the microchannel. Briefly, one hundred and fifty million RBCs following filtration after erythroid induction as described above were spun down and resuspended in fresh Step-3 media to a final concentration of 10×10⁶ cells/mL. Cultured RBCs were washed with PBS, and resuspended in PBS to achieve a 20% target hematocrit. A 15 μL volume of cultured RBCs was loaded onto the device under constant pressure and subjected to varying levels of oxygen controlled via a gas mixing system. The flow was captured by a high-speed camera and the blood velocity through the channel was determined using the Kanade-Lucus-Tomasi feature tracking in MATLAB. The velocity of the cells was then measured under a range of oxygen levels. Typical oxygen levels observed in the venous circulation are approximately 4% to 6% oxygen.

[0460] RBCs from normal donors showed no oxygen-dependent rheology impairment (FIG. 54A, FIG. 54B). While the rheological behavior of RBCs derived from RNP32-edited SCD CD34+ cells did not completely normalize, they exhibited lower magnitudes of impairment during hypoxia and required more extreme hypoxia before the onset of a decrease in velocity compared with RBCs derived from untreated SCD CD34+ cells (10% oxygen for RBCs derived from untreated SCD CD34+ cells and 6% oxygen for RBCs derived from RNP32-edited SCD CD34+ cells). As shown in FIG. 54C, RBCs derived from RNP32-edited SCD CD34+ cells (circles) demonstrated a drastically improved rheological behavior compared to RBCs derived from untreated SCD CD34+ cells (triangles) at physiological oxygen levels. Unedited RBCs from normal donors (diamonds) showed no oxygen-dependent rheology impairment. While the rheological behavior of RBCs derived from RNP32-edited SCD CD34+ cells did not completely normalize, they exhibited lower magnitudes of impairment during hypoxia and required more extreme hypoxia for the onset of decrease in velocity compared with RBCs derived from unedited SCD patient CD34+ cells. Notably, at oxygen levels typically observed in the venous circulation, the velocity of red blood cells derived from RNP32-edited CD34 cells was almost fully normalized compared to RBC derived normal donor cells. The reduction in rheology impairment under hypoxia was also strongly correlated with increased levels of HbF in the RBCs (FIG. 54D, FIG. 54E). For example FIG. 54E shows that RBCs that had the highest HbF levels exhibited the highest velocity at a physiological oxygen level of 4%. This indicates that the phenotypic correction of RBCs from sickle cell patients is greatest with very high levels of HbF expression, as observed with RBCs derived from RNP32-edited SCD CD34+ cells (FIG. 54D, FIG. 54E).

[0461] In sum, two studies were conducted to interrogate editing of SCD and normal CD34+ cells with RNP32 and determine the functional outcome in the erythroid progeny. RNP32 efficiently edited normal and SCD CD34+ cells, achieving approximately 90% insertions and/or deletions (indels) at Day 3 post-electroporation. Editing of CD34+ cells with RNP32 did not negatively impact the erythroid differentiation or maturation. Robust HbF expression was obtained, averaging 43.26% and 54.21% of total hemoglobin in RBCs derived from RNP32-edited normal and SCD CD34+ cells respectively, distributed in a pancellular fashion (averaging >92% RBCs). The high level of HbF expression in RBCs derived from RNP32-edited SCD CD34+ cells coincided with decreased sickling, improved deformability under shear stress, and improved flow through microfluidic channels when deoxygenated compared to RBCs derived from untreated SCD CD34+ cells. Potentially therapeutically relevant levels of HbF were achieved through highly efficient RNP32 editing of CD34+ cells at the HBG1 and HBG2 promoter region. This translates to a reduction in sickling and improved rheological properties in red blood cells, which is advantageous for an autologous cell therapy using RNP32 for the treatment of sickle-cell disease.

### Example 18: Meta-Analysis of On-Target Indels Generated by RNP32 in CD34+ Cells

[0462] Following CRISPR/Cas editing, DNA repair mechanisms like non-homologous end joining (NHEJ) and microhomology-mediated end joining (MMEJ) result in highly heterogeneous repair outcomes comprising hundreds of different genotypes. The editing outcomes produced when using Cpf1 (also referred to as AsCas12a), the enzyme used for RNP32, have not been characterized in detail. Cpf1 editing results in a four nucleotide 5′ overhang (see FIG. 55A), which is quite different from the blunt ends of SpCas9 edits (see FIG. 41A). As used in this example, “cut site” is used to refer to the position at the middle of the expected overhang resulting from editing with RNP32 (FIG. 55A, grey dashed line).

[0463] DNA repair mechanisms often create indels ranging in size from 1 to approximately 50 base pairs (bp), which are typically detected by PCR-based targeted sequencing assays. More complex genomic repair outcomes have also been described (Error! Reference source not found. 2018; Error! Reference source not found. 2018; Error! Reference source not found. 2020), and include deletions at the on-target locus larger than −50 bp, called resections, and translocations. These more complex rearrangements require other methods for a precise quantification (see, e.g., PCT/US2018/012652).

[0464] To determine the indel profile generated by RNP32, indels ranging in size from 1 bp to approximately 50 bp at the distal CCAAT-box generated by RNP32 were characterized using PCR-based targeted sequencing assays. The indel patterns were studied in a variety of samples, spanning different genotypes (normal vs sickle cell disease) and mobilization regimens (plerixafor alone vs G-CSF alone vs G-CSF+plerixafor) (Table 12). This meta-analysis demonstrates that RNP editing at the CCAAT box results in a distinct indel profile that is reproducible across a variety of samples and levels of editing.

TABLE 22
Samples used in meta-analysis

| Exp. #/ | Donor | CEL ID | Donor Mobilization | RNP32 |
|---|---|---|---|---|
| Batch # | Type | (Donor) | Regimen | [μM] |
| SCD011 | Normal | CEL238-001 | G-CSF & plerixafor | 6 |
| SCD011 | SCD | CEL211-001 | plerixafor | 6 |
| SCD014 | Normal | CEL021-014 | G-CSF & plerixafor | 6 |
| SCD014 | Normal | CEL042-001 | G-CSF | 6 |
| SCD014 | Normal | CEL238-001 | G-CSF & plerixafor | 6 |
| SCD014 | SCD | CEL211-001 | plerixafor | 6 |
| SCD014 | SCD | CEL239-001 | plerixafor | 6 |
| SCD014 | SCD | CEL240-001 | plerixafor | 6 |
| SCD014 | SCD | CEL241-001 | plerixafor | 6 |
| SCD1 | Normal | CEL172-008 | G-CSF & plerixafor | 8 |
| SCD1 | Normal | CEL182-008 | G-CSF & plerixafor | 8 |
| SCD1 | Normal | CEL171-008 | G-CSF & plerixafor | 8 |
| SCD1 | Normal | CEL192-008 | G-CSF & plerixafor | 8 |
| SCD1 | Normal | CEL168-008 | G-CSF & plerixafor | 8 |

Samples were obtained from research-scale (SCD011, SCD014) or large-scale (SCD1) processes. No significant differences were observed in RNP32-edited cells produced using research-scale versus large-scale processes (data not shown). The donors from experiments SCD011 and SCD014 are the same as those in Example 17 (Table 20).

[0465] Mobilized peripheral blood CD34+ cells from 12 distinct donors (normal donors and SCD donors) were used in this meta-analysis (Table 22). Five samples from normal donors were generated using a large-scale process (Table 22, Experiment SCD1). Briefly, leukopaks (HemaCare or KeyBiologics) were obtained from normal donors mobilized with granulocyte colony stimulating factor (G-CSF) and plerixafor. CD34+ cells were enriched using the CliniMACS Plus system, aliquoted, cryopreserved in Cryostor CS10, and stored in liquid nitrogen vapor phase. CD34+ cells were thawed, cultured for 2 days in complete media consisting of X-Vivo 10, supplemented with 1× Glutamax, 100 ng/mL stem cell factor (SCF), 100 ng/mL thrombopoietin (TPO), and 100 ng/mL FMS-like tyrosine kinase 3 ligand (Flt3L), mixed with RNP32 (at a gRNA/protein molar ratio of 2) to a final concentration of 8 μM, and electroporated with a Maxcyte GT electroporation device per manufacturer's instruction. The cellular materials were cultured overnight following electroporation, aliquoted, and cryopreserved in Cryostor CS10, and stored in liquid nitrogen vapor phase until ready for experimentation.

[0466] Nine samples were generated using a research-scale process (Table 22, SCD011 and SCD014). Cells were thawed, washed, and cultured at 1×10⁶ cells/mL in complete media consisting of X-Vivo 10, supplemented with 1× Glutamax, 100 ng/mL stem cell factor (SCF), 100 ng/mL thrombopoietin (TPO), and 100 ng/mL FMS-like tyrosine kinase 3 ligand (Flt3L) for 2 days in a humidified incubator at 37° C., 5% carbon dioxide (CO2). After 2 days of culture, cells were collected and resuspended in Maxcyte electroporation buffer. RNP32 (at a gRNA/protein molar ratio of 2) was added to the cell suspension to a final concentration of 6 μM. The mixture was transferred to a Maxcyte OC-100 cartridge and electroporated with a Maxcyte GT electroporation device per manufacturer's instruction. After electroporation, cells were cultured in complete media for 1 day prior to harvesting for analysis.

[0467] The fraction of small indels present in the samples was assessed by Illumina amplicon sequencing (ILL-seq), following library preparation method and analysis. A 15 bp window around the expected cut site was used in the analysis to calculate editing rates. The oligonucleotides and amplicon used to generate the targeted amplicon sequencing products are provided in FIG. 55A and FIG. 55B.

[0468] To characterize editing by RNP32, the indels generated in each sample were analyzed and processed. The results were summarized by looking at 1) percentage deletion for each base within the target region, 2) distribution of insertion and deletion center positions, and 3) distribution of insertion and deletion lengths. To perform these analyses, the cigar strings for the reads in the alignment bam files were processed, using the following steps:
[0469] 5) Group indels appearing in the same read.
[0470] 6) Create indel_id for indels from each read. Indel_id is a string identifying the indel, shown as indel_start_position+_+indel_length+_+ID. Where ID is NA for deletions and for insertions is the sequence inserted. See example in FIG. 55D.
[0471] 7) Group reads with the same indel_id.
[0472] 8) Count number of reads with the same indels and calculate their total fractions (including wt) and fractions in indels (excluding wt). Fractions in indels allow for a comparison between samples when they have different amounts of total editing.

[0473] To analyze the reproducibility of the individual indels detected across samples, the number of times they were detected across samples and their average percentage in indels was estimated. When an indel was not detected in a particular sample it was assumed to have a percentage of 0%.

[0474] The total percentage of indels for each RNP32-edited sample in this analysis are shown in Table 23. All the samples (including normal and SCD donors) exhibited overall editing greater than 72.6% (ranging from 72.6% to 89.2%), except for three samples that exhibited lower editing between about 40% to 53%. The samples exhibiting lower editing had low viability potentially associated with lower numbers of cells used for electroporation.

TABLE 23
Editing results for all the samples

| Donor Type | CEL ID | EXP # | Total Indels % |
|---|---|---|---|
| Normal | CEL238-001 | SCD011 | 84.39% |
| SCD | CEL211-001 | SCD011 | 79.50% |
| Normal | CEL021-014 | SCD014 | 40.07% |
| Normal | CEL042-001 | SCD014 | 78.37% |
| Normal | CEL238-001 | SCD014 | 80.70% |
| SCD | CEL211-001 | SCD014 | 46.78% |
| SCD | CEL239-001 | SCD014 | 52.92% |
| SCD | CEL240-001 | SCD014 | 75.38% |
| SCD | CEL241-001 | SCD014 | 72.63% |
| Normal | CEL172-008 | SCD1 | 88.91% |
| Normal | CEL182-008 | SCD1 | 87.11% |
| Normal | CEL171-008 | SCD1 | 84.04% |
| Normal | CEL192-008 | SCD1 | 89.24% |
| Normal | CEL168-008 | SCD1 | 88.76% |

[0475] In total, 385 unique indels were detected, counting only those indels that were found at a percentage above 0.1% (out of total indels) in at least one of the samples in Table 25.

[0476] The wt allele and the top 20 indels are shown in FIG. 57, alongside their relative average frequency (amongst all samples). The most abundant indel, 159_-18_NA, was present on average 15.15% among all the samples. Notably, indel 157_-13_NA, more commonly known as the 13 bp HPFH deletion, was detected on average at 2.63%. The 13 bp deletion is a naturally occurring mutation associated with elevated HbF.

[0477] Indel analysis of the bulk CD34+ population (progenitors) 24-72 hours after electroporation can determine whether editing at this site was derived from Cas12a, or Cas9. In the case of Cas12a, the most dominant indel detected at this timepoint is the 159_-18 deletion, however with Cas9 the most frequent indel is the 157_-13 deletion. In addition, the most common NHEJ indel generated by Cas9 at this site is a −1 bp deletion (169_-1_NA, Table 24), which occurred here at ˜9.6%. In contrast, following editing with Cas12a, the most common NHEJ indels generated are 6 bp and 4 bp deletions (165_-6_NA, and 167_-4_NA; Table 24, RNP58; Table 25, RNP32). Cpf1 generally produces larger NHEJ deletions, when compared to Cas9 at this site.

[0478] Indel analysis of the bulk CD34+ population (progenitors) 24-72 hours after electroporation can determine whether edits (indels) at this site were derived from Cpf1 or Cas9. For example, in the case of Cpf1, the most dominant indel detected at this timepoint is the 159_-18 deletion at an average percentage of 15.15% of the total indels (Table 25) compared to an average percentage of 1.35% for SpCas9, see Table 24. However, the most frequent indel for SpCas9 is the 157_-13 deletion at an average percentage of 31.88% of the total indels (Table 24) versus an average percentage of 2.63% of the total indels for Cpf1 (Table 25).

[0479] Results for the distributions of indel center points and indel lengths are shown in FIGS. 58 and 59, respectively. The most common indel center position (peak) was located 6 bp away from the cut site, at position TSS:−113. Peaks in the deletion length distribution were observed at 13 bp and 18 bp, corresponding mostly to the 157_-13_NA and 159_-18_NA MMEJ indels. Due to the resection and utilization of microhomology sequences during MMEJ repair, this pathway tends to generate larger size deletions than those mediated via the NHEJ pathway. Besides those, the most commonly observed deletion length was 5 bp with 9.30% (FIG. 60). Insertions were rarely detected (total contribution of 0.50%). Deletions between 1 bp and 25 bp had a total contribution of 92.03% among all indels (deletions between 3 bp and 25 bp had a total contribution of 85.85% among all indels, deletions between 4 bp and 25 bp had a total contribution of 80.35% among all indels, and deletions between 5 bp and 25 bp had a total contribution of 72.04% among all indels) (Table 25). Overall, both the distribution of indel center points and indel lengths were very similar across the Normal and SCD samples. As shown in FIG. 41C above, the generation of indels 4 bp and longer results in the highest induction of HbF.

[0480] The results for the percentage of bases deleted along the target region (deletion profile) are shown in FIG. 61 and FIG. 62 (normalized to the same maximum value of 1 for comparison between samples). The shapes of the profiles are very similar across all samples, despite having different total editing values (Table 23). No major differences were observed between Normal donor (Normal) and sickle cell disease donor (SCD) samples or different mobilization regimens. The deletion profiles show that the peak of the distribution (most commonly deleted base) is 6 bp toward the TSS from the cut site, at TSS: −113.

[0481] Of the total of 385 indels detected at 0.1% in any of the samples evaluated, 108 indels were detected in all 14 samples (FIG. 63 and Table 25). All indels present at an average percentage in indel greater than 0.22% were detected in all 14 samples (a total of 55 indels, above the grey line FIG. 64 and also in Table 25), and had a total indel contribution of 69.90%. Overall, the reproducibility of indel detection was very high.

[0482] To look in more detail at the consistency in each individual indel frequency between the indels detected across all samples, their pairwise correlation plots and R² were calculated. To avoid under sampling bias, when comparing two samples, only indels which had a minimum percentage of 0.1% (of all indels) in at least one of the two samples was considered. Excluding the three samples with editing below 60% due to the low number of cells used for electroporation (see Table 22), all R² values were greater than 0.8 (data not shown). Overall, the correlation between indel percentages among the samples with high editing was very high.

[0483] In sum, a total of 385 unique indels were detected at a percentage above 0.1% in at least one of the 14 edited samples tested in this Example. The most abundant indel, 159_-18_NA, was present between all the indels on average 15.15% among all the samples. Indel 157_-13_NA, more commonly known as the 13 bp HPFH deletion, was detected on average at 2.63%. The shapes of the indel profiles for all edited samples were very similar across all studies, despite having different total editing values. No major differences were observed between Normal donor and SCD donor samples or different mobilization regimens.

[0484] Evaluation of individual indel positions showed that indels generated by RNP32 were mostly centered around position TSS: −113, which was also the most commonly deleted base observed. Evaluation of the distribution of indel lengths showed peaks at ˜18 and ˜13 corresponding primarily to the MMEJ indels, 159_-18_NA (most abundant indel, starting at TSS: −104 and of length 18 bases) and 157_-13_NA (starting at TSS: −102, 13 bp HPFH deletion). Besides these, the most commonly observed deletion length was 5 bp at 9.30%. Insertions were rarely detected (total contribution of 0.50%). Deletions between 1 bp and 25 bp had a total contribution of 92.03% among all indels. Overall, the distribution of indel length and center position were very similar between the Normal and SCD samples. Of the total of 385 unique indels, 108 indels were detected in all 14 samples. All indels present at an average percentage in indel greater than 0.22% were detected in all 14 samples (a total of 55 indels), and had a total indel contribution of 69.90%. Pairwise correlations among the detected indels (excluding the three samples with editing below 60%) had R² values greater than 0.8.

[0485] This data demonstrate that RNP32 editing at the HBG1/2 distal CCAAT box results in a unique indel signature that is reproducible across a variety of samples and levels of editing.

### Example 19: Analysis of Normal Donor CD34+ Cell RNP32 Editing Efficiency Including 4.9 kb Fragment Deletion

[0486] The on-target editing efficiency of RNP32 in mobilized peripheral blood CD34+ cells obtained from four independent normal adult donors was assessed, as well as the frequency of deletion of the 4.9 kb fragment between the two RNP32 cut sites. In addition, the on-target indel levels and frequency of the 4.9 kb deletion were also measured in several subpopulations of HSPC sorted from total CD34+ cells to address whether phenotypic long-term hematopoietic stem cells (LT-HSC) could be edited efficiently with RNP32.

[0487] Leukopaks from four normal donors treated with granulocyte colony-stimulating factor (G-CSF) plus Mozobil or with G-CSF alone were obtained from HemaCare. CD34+ cells (Lot: CEL045-002, CEL046-004, CEL047-002, and CEL021-021) were enriched using the CliniMACS system (Miltenyi), aliquoted, and cryopreserved in Cryostor CS10. Cells were thawed, washed, and cultured at 1×10⁶ cells/mL in complete media consisting of X-Vivo 10, supplemented with 1× Glutamax, 100 ng/mL stem cell factor (SCF), 100 ng/mL thrombopoietin (TPO), and 100 ng/mL FMS-like tyrosine kinase 3 ligand (Flt3L) for 2 days in a humidified incubator at 37° C., 5% carbon dioxide (CO2). After 2 days of cultures, cells were collected and resuspended in Maxcyte electroporation buffer. RNP32 (gRNA/protein molar ratio of 2) was added to the cell suspension to a final concentration of 6 μM. The mixture was transferred to a Maxcyte OC-100 cartridge and electroporated with a Maxcyte GT electroporation device per manufacturer's instruction.

[0488] RNP32 recognizes both HBG1 and HBG2 promoters. Cleavage at both sites can lead to the deletion of the 4.9 kb intervening sequence. To assess the frequency of the 4.9 kb fragment deletion, the two ddPCR assays, reference amplicon and on-target amplicon, were performed as described in Example 17 (see FIGS. 48A-48D). Briefly, cells at 1 or 2 days post-electroporation with RNP32, and sorted cells were resuspended in Quick Extract at a concentration of 2,000 to 4,000 cells/μL. Crude genomic deoxyribonucleic acid (gDNA) extraction was conducted by subjecting the lysate to the following conditions in a thermocycler: 15 min at 65° C. followed by 10 min at 95° C. Crude gDNA was then analyzed for indels (insertions and deletions) by next generation sequencing (using the primers set forth in FIG. 55A) and 4.9 kb fragment deletion assessment by digital droplet polymerase chain reaction (ddPCR).

[0489] RNP32 edited the HBG1 and HBG2 promoters of normal donor CD34+ cells in an RNP concentration-, and time-dependent manner without significantly impacting the cell viability (FIG. 65A, 65B, FIG. 66, and FIG. 67). At 8 μM, the highest concentration of RNP32 tested, an average of 86% on-target indel level was achieved in normal donor CD34+ cells by Day 1 and rose to 91% by Day 2 post-electroporation (FIG. 68). The increase was more evident at lower RNP concentration with average indel level at 1 μM rising from 62% to 77% by Day 1 and Day 2 post-electroporation. By Day 2 post-electroporation, ≥85% on-target indel level was routinely achieved when CD34+ cells were transfected with ≥3 μM RNP32.

[0490] Editing of CD34+ cells with RNP32 resulted in frequent deletion of the 4.9 kb intervening fragment between the two RNP32 cut sites at the HBG1 and HBG2 gene promoters, respectively. On average, approximately 35% of the beta globin loci in the CD34+ cells had the 4.9 kb fragment deleted both at Day 1 and Day 2 post electroporation with ≥2 μM of RNP32 (FIG. 69A, FIG. 69B and FIG. 70). The 4.9 kb fragment deletion to indel ratio in CD34+ cells was approximately 0.47 at Day 1 and decreased to approximately 0.40 at Day 2 post-electroporation with ≥2 μM of RNP32.

[0491] CD34+ cells are heterogeneous and comprise lineage-restricted progenitors, MPPs, as well as self-renewing LT-HSCs. As LT-HSCs will be responsible for providing long-term reconstitution of a patient's hematopoietic system, high levels of editing in this population are pertinent for the durability of the treatment. To address whether different subpopulations of CD34+ cells were edited similarly, the on-target indel levels in CMPs, MPPs, and phenotypic LT-HSCs, defined by surface immunophenotype, was evaluated and compared to the on-target indel levels in total CD34+ cells across multiple RNP concentrations.

[0492] Briefly, CD34+ cells were sorted two days post electroporation with RNP32 to obtain three subpopulations of HSPCs including phenotypic LT-HSC, multipotent progenitor (MPP) cells, and common myeloid progenitor (CMP) cells using a BD fluorescence-activated cell sorting (FACS)Aria Fusion cell sorter (BD Biosciences). Gating was set to collect the following enriched CD34+ cell subpopulations: phenotypic LT-HSC (P7, CD34 bright, CD38 low/negative, CD90+, CD45RA−), MPP (P6, CD34 bright, CD38 low/negative, CD90−, CD45RA−), and CMP (P9, CD34 bright, CD38 high, CD123+, CD45RA−).

[0493] Of the three subpopulations, CMPs consistently had the highest on-target indel levels and phenotypic LT-HSCs had the lowest on-target indel levels (analyzed via NGS using the primers set forth in FIG. 55B) across all RNP concentrations evaluated (FIG. 71A, FIG. 71B and FIG. 72 Error!Reference source not found.) (Study MAX072). Nevertheless, at >3 μM RNP32, on-target indel levels of >85% were achieved in phenotypic LT-HSCs, similar to the on-target indel levels detected in total CD34+ cells, suggesting that self-renewing LT-HSCs can be efficiently edited using RNP32 (FIG. 71A, FIG. 71B and FIG. 72).

[0494] RNP32 editing resulted in deletion of the 4.9 kb fragment in all three subpopulations of hematopoietic stem and progenitor cells tested (FIG. 73A and FIG. 74). Of the three subpopulations, CMPs consistently had the highest levels of deletion of the 4.9 kb fragment and phenotypic LT-HSCs had the lowest levels of deletion of the 4.9 kb fragment across all RNP concentrations evaluated. The 4.9 kb fragment to indel ratio averaged across all RNP concentrations was approximately 0.43, 0.49, 0.33, and 0.25 in total CD34+ cells, CMP, MPP, and phenotypic LT-HSC respectively (FIG. 73B), demonstrating that the LT-HSCs had less frequent deletion of the 4.9 kb fragment as a result of RNP32 editing than their short term counterparts. Retention of the 4.9 kb inter-edit region is beneficial because a higher deletion of the 4.9 kb fragment results in a lower production of HbF. Therefore, lower levels of deletion of the 4.9 kb fragment in LT-HSCs edited by RNP32 is advantageous. The results herein demonstrate that editing with RNP32 can generate cells with clinically relevant levels of healthy HbF.

[0495] In sum, on-target indel levels and the associated 4.9 kb fragment deletion between the HBG1 and HBG2 promotors were assessed following electroporation of normal human donor CD34+ cells with RNP32. RNP32 was highly efficient at editing CD34+ cells, with consistent editing achieved across multiple RNP batches and cell donor lots. Greater than 85% on target indels in CD34+ cells were routinely achieved when electroporated with ≥3 μM RNP32. Comparable levels of indels between total CD34+ cells and sorted phenotypic LT HSC were also observed when electroporated with >3 μM RNP32. Loss of the 4.9 kb fragment between two RNP32 cut sites occurred at a frequency that was cell subpopulation dependent. Total CD34+ cells lost the 4.9 kb fragment at a frequency of approximately 0.4 per indel. This frequency dropped to approximately 0.25 per indel in the phenotypic LT-HSC subset of CD34+ cells.

### Example 20: Treatment of β-Hemoglobinopathy Using Edited Hematopoietic Stem Cells

[0496] The methods and genome editing systems disclosed herein may be used for the treatment of a β-hemoglobinopathy, such as sickle cell disease or beta-thalassemia, in a patient in need thereof. For example, genome editing may be performed on cells derived from the patient in an autologous procedure. Correction of the patient's cells ex-vivo and reintroduction of the cells into the patient may result in increased HbF expression and treatment of the β-hemoglobinopathy.

[0497] For example, HSCs may be extracted from the bone marrow of a patient with a β-hemoglobinopathy using techniques that are well-known to skilled artisans. The HSCs may be modified using methods disclosed herein for genome editing. For example, RNPs comprised of guide RNAs (gRNA) that target one or more regions in the HBG gene complexed with an RNA-guided nuclease may be used to edit the HSCs. In certain embodiments, the RNA-guided nuclease may be a Cpf1 protein. In certain embodiments, the Cpf1 protein may be a modified Cpf1 protein. In certain embodiments, the modified Cpf1 protein may be encoded by a sequence set forth in SEQ ID NOs:1000, 1001, 1008-1018, 1032, 1035-39, 1094-1097, 1107-09 (Cpf1 polypeptide sequences) or SEQ ID NOs:1019-1021, 1110-17 (Cpf1 polynucleotide sequences). For example, the modified Cpf1 protein may be encoded by the sequence set forth in SEQ ID NO:1097. In certain embodiments, the gRNA may be a modified or unmodified gRNA. In certain embodiments, the gRNA may comprise a sequence set forth in Table 6, Table 12, or Table 13. For example, in certain embodiments, the gRNA may comprise the sequence set forth in SEQ ID NO:1051. In certain embodiments, the RNP complex may comprise an RNP complex set forth in Table 15. For example, the RNP complex may include a gRNA comprising the sequence set forth in SEQ ID NO:1051 and a modified Cpf1 protein encoded by the sequence set forth in SEQ ID NO:1097 (RNP32, Table 15). In certain embodiments, modified HSCs have an increase in the frequency or level of an indel in the human HBG1 gene, HBG2 gene, or both, relative to unmodified HSCs. In certain embodiments, the modified HSCs can differentiate into erythroid cells that express an increased level of HbF. A population of the modified HSCs may be selected for reintroduction into the patient via transfusion or other methods known to skilled artisans. The population of modified HSCs for reintroduction may be selected based on, for example, increased HbF expression of the erythroid progeny of the modified HSCs or increased indel frequency of the modified HSCs. In some embodiments, any form of ablation prior to reintroduction of the cells may be used to enhance engraftment of the modified HSCs. In other embodiments, peripheral blood stem cells (PBSCs) can be extracted from a patient with a β-hemoglobinopathy using techniques that are well-known to skilled artisans (e.g., apheresis or leukapheresis) and stem cells can be removed from the PBSCs. The genome editing methods described above can be performed on the stem cells and the modified stem cells can be reintroduced into the patient as described above.

TABLE 14
Cpf1 Protein Variants

| | Cpf1 Variant Amino | Cpf1 Variant Nucleotide |
|---|---|---|
| Cpf1 Variant ID | Acid SEQ ID NO* | SEQ ID NO* |
| His-AsCpf1-sNLS- | SEQ ID NO: 1032 | SEQ ID NO: 1110 |
| SNLS H800A | | |
| Cpf1-1 | SEQ ID NO: 1094 | SEQ ID NO: 1111 |
| Cpf1-2 | SEQ ID NO: 1095 | SEQ ID NO: 1112 |
| Cpf1-3 | SEQ ID NO: 1096 | SEQ ID NO: 1113 |
| Cpf1-4 | SEQ ID NO: 1097 | SEQ ID NO: 1114 |
| Cpf1-5 | SEQ ID NO: 1107 | SEQ ID NO: 1115 |
| Cpf1-6 | SEQ ID NO: 1108 | SEQ ID NO: 1116 |
| Cpf1-7 | SEQ ID NO: 1109 | SEQ ID NO: 1117 |

*See FIG. 40

TABLE 15
RNP complexes

| | | Cpf1 Amino Acid |
|---|---|---|
| RNP Name | gRNA SEQ ID NO* | SEQ ID NO** |
| RNP64 | SEQ ID NO: 1022 | SEQ ID NO: 1109 |
| RNP1 | SEQ ID NO: 1051 | SEQ ID NO: 1095 |
| RNP2 | SEQ ID NO: 1098 | SEQ ID NO: 1094 |
| RNP3 | SEQ ID NO: 1099 | SEQ ID NO: 1094 |
| RNP4 | SEQ ID NO: 1100 | SEQ ID NO: 1094 |
| RNP5 | SEQ ID NO: 1101 | SEQ ID NO: 1094 |
| RNP6 | SEQ ID NO: 1068 | SEQ ID NO: 1094 |
| RNP7 | SEQ ID NO: 1102 | SEQ ID NO: 1094 |
| RNP8 | SEQ ID NO: 1081 | SEQ ID NO: 1094 |
| RNP9 | SEQ ID NO: 1082 | SEQ ID NO: 1094 |
| RNP10 | SEQ ID NO: 1083 | SEQ ID NO: 1094 |
| RNP11 | SEQ ID NO: 1069 | SEQ ID NO: 1094 |
| RNP12 | SEQ ID NO: 1084 | SEQ ID NO: 1094 |
| RNP16 | SEQ ID NO: 1085 | SEQ ID NO: 1094 |
| RNP19 | SEQ ID NO: 1088 | SEQ ID NO: 1094 |
| RNP20 | SEQ ID NO: 1089 | SEQ ID NO: 1094 |
| RNP21 | SEQ ID NO: 1090 | SEQ ID NO: 1094 |
| RNP22 | SEQ ID NO: 1091 | SEQ ID NO: 1094 |
| RNP23 | SEQ ID NO: 1048 | SEQ ID NO: 1097 |
| RNP24 | SEQ ID NO: 1093 | SEQ ID NO: 1094 |
| RNP26 | SEQ ID NO: 1051 | SEQ ID NO: 1096 |
| RNP27 | SEQ ID NO: 1051 | SEQ ID NO: 1107 |
| RNP28 | SEQ ID NO: 1051 | SEQ ID NO: 1108 |
| RNP29 | SEQ ID NO: 1103 | SEQ ID NO: 1094 |
| RNP30 | SEQ ID NO: 1104 | SEQ ID NO: 1094 |
| RNP31 | SEQ ID NO: 1105 | SEQ ID NO: 1094 |
| RNP32 | SEQ ID NO: 1051 | SEQ ID NO: 1097 |
| RNP33 | SEQ ID NO: 1022 | SEQ ID NO: 1032 |
| RNP34 | SEQ ID NO: 1041 | SEQ ID NO: 1032 |
| RNP37 | SEQ ID NO: 1042 | SEQ ID NO: 1032 |
| RNP38 | SEQ ID NO: 1043 | SEQ ID NO: 1032 |
| RNP39 | SEQ ID NO: 1044 | SEQ ID NO: 1032 |
| RNP40 | SEQ ID NO: 1045 | SEQ ID NO: 1032 |
| RNP41 | SEQ ID NO: 1046 | SEQ ID NO: 1032 |
| RNP42 | SEQ ID NO: 1047 | SEQ ID NO: 1032 |
| RNP43 | SEQ ID NO: 1048 | SEQ ID NO: 1032 |
| RNP44 | SEQ ID NO: 1049 | SEQ ID NO: 1032 |
| RNP45 | SEQ ID NO: 1022 | SEQ ID NO: 1094 |
| RNP46 | SEQ ID NO: 1046 | SEQ ID NO: 1094 |
| RNP47 | SEQ ID NO: 1047 | SEQ ID NO: 1094 |
| RNP48 | SEQ ID NO: 1052 | SEQ ID NO: 1094 |
| RNP49 | SEQ ID NO: 1048 | SEQ ID NO: 1094 |
| RNP50 | SEQ ID NO: 1053 | SEQ ID NO: 1094 |
| RNP51 | SEQ ID NO: 1054 | SEQ ID NO: 1094 |
| RNP52 | SEQ ID NO: 1055 | SEQ ID NO: 1094 |
| RNP53 | SEQ ID NO: 1056 | SEQ ID NO: 1094 |
| RNP54 | SEQ ID NO: 1057 | SEQ ID NO: 1094 |
| RNP55 | SEQ ID NO: 1058 | SEQ ID NO: 1094 |
| RNP56 | SEQ ID NO: 1059 | SEQ ID NO: 1094 |
| RNP57 | SEQ ID NO: 1060 | SEQ ID NO: 1094 |
| RNP58 | SEQ ID NO: 1051 | SEQ ID NO: 1094 |
| RNP59 | SEQ ID NO: 1067 | SEQ ID NO: 1094 |
| RNP60 | SEQ ID NO: 1068 | SEQ ID NO: 1094 |
| RNP61 | SEQ ID NO: 1041 | SEQ ID NO: 1095 |
| RNP62 | SEQ ID NO: 1041 | SEQ ID NO: 1094 |
| RNP63 | SEQ ID NO: 1022 | SEQ ID NO: 1095 |

*See Table 13
**See Table 14

TABLE 16
Cpf1 HBG1 targeting domains and expected cleavage sites

| | gRNA | gRNA | Targeting | Expected | | |
|---|---|---|---|---|---|---|
| | Targeting | Targeting | Domain | cleavage site | | Targeting |
| | Domain | Domain | coordinates | coordinates | | Domain |
| gRNA ID | (RNA) | (DNA) | at HBG1* | at HBG1^{#} | Strand | Length |
| HBG1-1 | CCUUGU | CCTTGTCA | Chr11:5249954- | Chr11:5249973, | + | 20 |
| | CAAGGC | AGGCTATT | 5249974 | Chr11:5249977 | | |
| | UAUUGG | GGTC (SEQ | | | | |
| | UC (SEQ | ID NO: 1003) | | | | |
| | ID | | | | | |
| | NO: 1002) | | | | | |
| HBG1-1 | CCUUGU | CCTTGTCA | Chr11:5249954- | Chr11:5249973, | + | 21 |
| (21 mer) | CAAGGC | AGGCTATT | Chr11:5249975 | Chr11:5249977 | | |
| | UAUUGG | GGTCA (SEQ | | | | |
| | UCA (SEQ | ID NO: 1255) | | | | |
| | ID | | | | | |
| | NO: 1254) | | | | | |
| HBG1-1 | CCUUGU | CCTTGTCA | Chr11:5249954- | Chr11:5249973, | + | 22 |
| (22 mer) | CAAGGC | AGGCTATT | Chr11:5249976 | Chr11:5249977 | | |
| | UAUUGG | GGTCAA | | | | |
| | UCAA | (SEQ ID | | | | |
| | (SEQ ID | NO: 1257) | | | | |
| | NO: 1256) | | | | | |
| HBG1-1 | CCUUGU | CCTTGTCA | Chr11:5249954- | Chr11:5249973, | + | 23 |
| (23 mer) | CAAGGC | AGGCTATT | Chr11:5249976 | Chr11:5249977 | | |
| | UAUUGG | GGTCAAG | | | | |
| | UCAAG | (SEQ ID | | | | |
| | (SEQ ID | NO: 1259) | | | | |
| | NO: 1258) | | | | | |
| AsCpf1 | AGACAG | AGACAGAT | Chr11:5250023- | Chr11:5250042, | + | 20 |
| HBG1 | AUAUUU | ATTTGCATT | Chr11:5250043 | Chr11:5250046 | | |
| Promoter-1 | GCAUUG | GAG (SEQ ID | | | | |
| | AG (SEQ | NO: 1140) | | | | |
| | ID | | | | | |
| | NO: 1139) | | | | | |
| AsCpf1 | AGACAG | AGACAGAT | Chr11:5250023- | Chr11:5250042, | + | 21 |
| HBG1 | AUAUUU | ATTTGCATT | Chr11:5250044 | Chr11:5250046 | | |
| Promoter-1 | GCAUUG | GAGA (SEQ | | | | |
| (21 mer) | AGA (SEQ | ID NO: 1261) | | | | |
| | ID | | | | | |
| | NO: 1260) | | | | | |
| AsCpf1 | CAUUGA | CATTGAGA | Chr11:5250036- | Chr11:5250055, | + | 20 |
| HBG1 | GAUAGU | TAGTGTGG | Chr11:5250056 | Chr11:5250059 | | |
| Promoter-2 | GUGGGG | GGAA (SEQ | | | | |
| | AA (SEQ | ID NO: 1142) | | | | |
| | ID | | | | | |
| | NO: 1141) | | | | | |
| AsCpf1 | CAUUGA | CATTGAGA | Chr11:5250036- | Chr11:5250055, | + | 21 |
| HBG1 | GAUAGU | TAGTGTGG | Chr11:5250057 | Chr11:5250059 | | |
| Promoter-2 | GUGGGG | GGAAG | | | | |
| (21 mer) | AAG (SEQ | | | | | |
| | ID | (SEQ ID | | | | |
| | NO: 1262) | NO: 1263) | | | | |
| AsCpf1 | CUUCUC | CTTCTCCCA | Chr11:5250160- | Chr11:5250179, | + | 20 |
| HBG1 | CCAUCA | TCATAGAG | Chr11:5250180 | Chr11:5250183 | | |
| Promoter-6 | UAGAGG | GAT (SEQ ID | | | | |
| | AU (SEQ | NO: 1150) | | | | |
| | ID | | | | | |
| | NO: 1149) | | | | | |
| AsCpf1 | CUUCUC | CTTCTCCCA | Chr11:5250160- | Chr11:5250179, | + | 21 |
| HBG1 | CCAUCA | TCATAGAG | Chr11:5250181 | Chr11:5250183 | | |
| Promoter-6 | UAGAGG | GATA (SEQ | | | | |
| (21 mer) | AUA (SEQ | ID NO: 1265) | | | | |
| | ID | | | | | |
| | NO: 1264) | | | | | |

*NCBI Reference Sequence NC_000011, the coordinates are reported using the One-based coordinate system, “Homo sapiens chromosome 11, GRCh38.p12 Primary Assembly,” (Version NC_000011.10).
^{#}Expected cleavage sites based on Zetsche et al, 2015, coordinates are reported using zero-based coordinates.

TABLE 17
Cpf1 HBG2 targeting domains and expected cleavage sites

| | gRNA | gRNA | Targeting | Expected | | |
|---|---|---|---|---|---|---|
| | Targeting | Targeting | Domain | cleavage site | | Targeting |
| | Domain | Domain | coordinates at | coordinates at | | Domain |
| gRNA ID | (RNA) | (DNA) | HBG2* | HBG2^{#} | Strand | Length |
| HBG1-1 | CCUUGUC | CCTTGTCAA | Chr11:5254878 | Chr11:5254897, | + | 20 |
| | AAGGCUA | GGCTATTGG | Chr11:5254898 | Chr11:5254901 | | |
| | UUGGUC | TC (SEQ ID | | | | |
| | (SEQ ID | NO: 1003) | | | | |
| | NO: 1002) | | | | | |
| HBG1-1 | CCUUGUC | CCTTGTCAA | Chr11:5254878 | Chr11:5254897, | + | 21 |
| 21 mer | AAGGCUA | GGCTATTGG | Chr11:5254899 | Chr11:5254901 | | |
| | UUGGUCA | TCA (SEQ ID | | | | |
| | (SEQ ID | NO: 1255) | | | | |
| | NO: 1254) | | | | | |
| HBG1-1 | CCUUGUC | CCTTGTCAA | Chr11:5254878 | Chr11:5254897, | + | 22 |
| 22 mer | AAGGCUA | GGCTATTGG | Chr11:5254900 | Chr11:5254901 | | |
| | UUGGUCA | TCAA (SEQ ID | | | | |
| | A (SEQ ID | NO: 1257) | | | | |
| | NO: 1256) | | | | | |
| HBG1-1 | CCUUGUC | CCTTGTCAA | Chr11:5254878 | Chr11:5254897, | + | 23 |
| 23 mer | AAGGCUA | GGCTATTGG | Chr11:5254901 | Chr11:5254901 | | |
| | UUGGUCA | TCAAG (SEQ | | | | |
| | AG (SEQ ID | ID NO: 1259) | | | | |
| | NO: 1258) | | | | | |
| AsCpf1 | AGACAGA | AGACAGATA | Chr11:5254947 | Chr11:5254966 | + | 20 |
| HBG1 | UAUUUGC | TTTGCATTG | Chr11:5254967 | Chr11:5254970 | | |
| Promoter-1 | AUUGAG | AG (SEQ ID | | | | |
| | (SEQ ID | NO: 1140) | | | | |
| | NO: 1139) | | | | | |
| AsCpf1 | AGACAGA | AGACAGATA | Chr11:5254947 | Chr11:5254966 | + | 21 |
| HBG1 | UAUUUGC | TTTGCATTG | Chr11:5254968 | Chr11:5254970 | | |
| Promoter-1 | AUUGAGA | AGA (SEQ ID | | | | |
| (21 mer) | (SEQ ID | NO: 1261) | | | | |
| | NO: 1260) | | | | | |
| AsCpf1 | CAUUGAG | CATTGAGAT | Chr11:5254960 | Chr11:5254979 | + | 20 |
| HBG1 | AUAGUGU | AGTGTGGGG | Chr11:5254980 | Chr11:5254983 | | |
| Promoter-2 | GGGGAA | AA | | | | |
| | (SEQ ID | (SEQ ID | | | | |
| | NO: 1141) | NO: 1142) | | | | |
| AsCpf1 | CAUUGAG | CATTGAGAT | Chr11:5254960 | Chr11:5254979 | + | 21 |
| HBG1 | AUAGUGU | AGTGTGGGG | Chr11:5254981 | Chr11:5254983 | | |
| Promoter-2 | GGGGAAG | AAG (SEQ ID | | | | |
| (21 mer) | (SEQ ID | NO: 1263) | | | | |
| | NO: 1262) | | | | | |

*NCBI Reference Sequence NC_000011, the coordinates are reported using the One-based coordinate system, ″Homo sapiens chromosome 11, GRCh38.p12 Primary Assembly,″ (Version NC_000011.10).
^{#}Expected cleavage sites based on (Zetsche et al, 2015), coordinates are reported using zero-based coordinates.

TABLE 18
gRNA 5′ Extensions

| 5′ extension | | |
|---|---|---|
| Sequence ID | | |
| No: | 5′ extension sequence | 5′ modification |
| 1231 | rCrUrUrUrU | +5 RNA |
| 1232 | rArArGrArCrCrUrUrUrU | +10 RNA |
| 1233 | rArUrGrUrGrUrUrUrUrUrGrUrCrArArArArGrArCrCrUrUrUrU | +25 RNA |
| 1234 | rArGrGrCrCrArGrCrUrUrGrCrCrGrGrUrUrUrUrUrUrArGrUrCrG | +60 RNA |
| | rUrGrCrUrGrCrUrUrCrArUrGrUrGrUrUrUrUrUrGrUrCrArArAr | |
| | ArGrArCrCrUrUrUrU | |
| 1235 | CTTTT | +5 DNA |
| 1236 | AAGACCTTTT | +10 DNA |
| 1237 | ATGTGTTTTTGTCAAAAGACCTTTT | +25 DNA |
| 1238 | AGGCCAGCTTGCCGGTTTTTTAGTCGTGCTGCTTCATGTG | +60 DNA |
| | TTTTTGTCAAAAGACCTTTT | |
| 1239 | TTTTTGTCAAAAGACCTTTT | +20 DNA |
| 1240 | GCTTCATGTGTTTTTGTCAAAAGACCTTTT | +30 DNA |
| 1241 | GCCGGTTTTTTAGTCGTGCTGCTTCATGTGTTTTTGTCAAA | +50 DNA |
| | AGACCTTTT | |
| 1242 | TAGTCGTGCTGCTTCATGTGTTTTTGTCAAAAGACCTTTT | +40 DNA |
| 1243 | C*C*GAAGTTTTCTTCGGTTTT | +20 DNA + 2xPS |
| 1244 | T*T*TTTCCGAAGTTTTCTTCGGTTTT | +25 DNA + 2xPS |
| 1245 | A*A*CGCTTTTTCCGAAGTTTTCTTCGGTTTT | +30 DNA + 2xPS |
| 1246 | G*C*GTTGTTTTCAACGCTTTTTCCGAAGTTTTCTTCGGTT | +41 DNA + 2xPS |
| | TT | |
| 1247 | G*G*CTTCTTTTGAAGCCTTTTTGCGTTGTTTTCAACGCTT | +62 DNA + 2xPS |
| | TTTCCGAAGTTTTCTTCGGTTTT | |
| 1248 | A*T*GTGTTTTTGTCAAAAGACCTTTT | +25 DNA + 2xPS |
| 1249 | AAAAAAAAAAAAAAAAAAAAAAAAA | +25 A |
| 1250 | TTTTTTTTTTTTTTTTTTTTTTTTT | +25 T |
| 1251 | mA*mU*rGrUrGrUrUrUrUrUrGrUrCrArArArArGrArCrCrUrUrU | +25 RNA + 2xPS |
| | rU | |
| 1252 | mA*mA*rArArArArArArArArArArArArArArArArArArArArAr | PolyA RNA + |
| | ArA | 2xPS |
| 1253 | mU*mU*rUrUrUrUrUrUrUrUrUrUrUrUrUrUrUrUrUrUrUrUrUr | PolyU RNA + |
| | UrU | 2xPS |

All bases are in upper case
Lowercase “r” represents RNA, 2′-hydroxy; bases not modified by an “r” are DNA
All bases are linked via standard phosphodiester bonds except as noted:
“*” represents phosphorothioate modification
“PS” represents phosphorothioate modification

TABLE 13
Cpf1 guide RNAs

| | | | | Length of | | |
|---|---|---|---|---|---|---|
| gRNA | | | | crRNA + | Length of | gRNA |
| Sequence | | | | gRNA | gRNA | Targeting |
| SEQ ID | | | | targeting | targeting | Domain |
| NO. | gRNA Sequence | 5′ mod.** | 3′ mod. | domain | domain | (RNA) |
| 1022 | rUrArArUrUrUrCr | − | − | 40 | 20 | CCUUGUC |
| | UrArCrUrCrUrUrG | | | | | AAGGCUA |
| | rUrArGrArUrCrCr | | | | | UUGGUC |
| | UrUrGrUrCrArArG | | | | | (SEQ ID |
| | rGrCrUrArUrUrGr | | | | | NO: 1002) |
| | GrUrC | | | | | |
| 1023 | rUrArArUrUrUrCr | − | 1xPS2- | 41 | 21 | CCUUGUC |
| | UrArCrUrCrUrUrG | | OMe + | | | AAGGCUA |
| | rUrArGrArUrCrCr | | 1xOMe | | | UUGGUCA |
| | UrUrGrUrCrArArG | | | | | (SEQ ID |
| | rGrCrUrArUrUrGr | | | | | NO: 1254) |
| | GrUmC/PS2/mA | | | | | |
| 1041 | rUrArArUrUrUrCr | − | 1xPS2- | 40 | 20 | CCUUGUC |
| | UrArCrUrCrUrUrG | | OMe + | | | AAGGCUA |
| | rUrArGrArUrCrCr | | 1xOMe | | | UUGGUC |
| | UrUrGrUrCrArArG | | | | | (SEQ ID |
| | rGrCrUrArUrUrGr | | | | | NO: 1002) |
| | GmU/PS2/mC | | | | | |
| 1042 | rCrUrUrUrUrUrAr | +5 RNA | − | 45 | 20 | CCUUGUC |
| | ArUrUrUrCrUrArC | | | | | AAGGCUA |
| | rUrCrUrUrGrUrAr | | | | | UUGGUC |
| | GrArUrCrCrUrUrG | | | | | (SEQ ID |
| | rUrCrArArGrGrCr | | | | | NO: 1002) |
| | UrArUrUrGrGrUrC | | | | | |
| 1043 | rArArGrArCrCrUr | +10 RNA | − | 50 | 20 | CCUUGUC |
| | UrUrUrUrArArUr | | | | | AAGGCUA |
| | UrUrCrUrArCrUrC | | | | | UUGGUC |
| | rUrUrGrUrArGrAr | | | | | (SEQ ID |
| | UrCrCrUrUrGrUrC | | | | | NO: 1002) |
| | rArArGrGrCrUrAr | | | | | |
| | UrUrGrGrUrC | | | | | |
| 1044 | rArUrGrUrGrUrUr | +25 RNA | − | 65 | 20 | CCUUGUC |
| | UrUrUrGrUrCrArA | | | | | AAGGCUA |
| | rArArGrArCrCrUr | | | | | UUGGUC |
| | UrUrUrUrArArUr | | | | | (SEQ ID |
| | UrUrCrUrArCrUrC | | | | | NO: 1002) |
| | rUrUrGrUrArGrAr | | | | | |
| | UrCrCrUrUrGrUrC | | | | | |
| | rArArGrGrCrUrAr | | | | | |
| | UrUrGrGrUrC | | | | | |
| 1045 | rArGrGrCrCrArGr | +60 RNA | − | 100 | 20 | CCUUGUC |
| | CrUrUrGrCrCrGrG | | | | | AAGGCUA |
| | rUrUrUrUrUrUrAr | | | | | UUGGUC |
| | GrUrCrGrUrGrCrU | | | | | (SEQ ID |
| | rGrCrUrUrCrArUr | | | | | NO: 1002) |
| | GrUrGrUrUrUrUr | | | | | |
| | UrGrUrCrArArArA | | | | | |
| | rGrArCrCrUrUrUr | | | | | |
| | UrUrArArUrUrUrC | | | | | |
| | rUrArCrUrCrUrUr | | | | | |
| | GrUrArGrArUrCrC | | | | | |
| | rUrUrGrUrCrArAr | | | | | |
| | GrGrCrUrArUrUrG | | | | | |
| | rGrUrC | | | | | |
| 1046 | CTTTTrUrArArUr | +5 DNA | − | 45 | 20 | CCUUGUC |
| | UrUrCrUrArCrUrC | | | | | AAGGCUA |
| | rUrUrGrUrArGrAr | | | | | UUGGUC |
| | UrCrCrUrUrGrUrC | | | | | (SEQ ID |
| | rArArGrGrCrUrAr | | | | | NO: 1002) |
| | UrUrGrGrUrC | | | | | |
| 1047 | AAGACCTTTTrUr | +10 DNA | − | 50 | 20 | CCUUGUC |
| | ArArUrUrUrCrUrA | | | | | AAGGCUA |
| | rCrUrCrUrUrGrUr | | | | | UUGGUC |
| | ArGrArUrCrCrUrU | | | | | (SEQ ID |
| | rGrUrCrArArGrGr | | | | | NO: 1002) |
| | CrUrArUrUrGrGrU | | | | | |
| | rC | | | | | |
| 1048 | ATGTGTTTTTGT | +25 DNA | − | 65 | 20 | CCUUGUC |
| | CAAAAGACCTT | | | | | AAGGCUA |
| | TTrUrArArUrUrUr | | | | | UUGGUC |
| | CrUrArCrUrCrUrU | | | | | (SEQ ID |
| | rGrUrArGrArUrCr | | | | | NO: 1002) |
| | CrUrUrGrUrCrArA | | | | | |
| | rGrGrCrUrArUrUr | | | | | |
| | GrGrUrC | | | | | |
| 1049 | AGGCCAGCTTG | +60 DNA | − | 100 | 20 | CCUUGUC |
| | CCGGTTTTTTAG | | | | | AAGGCUA |
| | TCGTGCTGCTTC | | | | | UUGGUC |
| | ATGTGTTTTTGT | | | | | (SEQ ID |
| | CAAAAGACCTT | | | | | NO: 1002) |
| | TTrUrArArUrUrUr | | | | | |
| | CrUrArCrUrCrUrU | | | | | |
| | rGrUrArGrArUrCr | | | | | |
| | CrUrUrGrUrCrArA | | | | | |
| | rGrGrCrUrArUrUr | | | | | |
| | GrGrUrC | | | | | |
| 1050 | ATGTGTTTTTGT | +25 DNA | 1xPS2- | 66 | 21 | CCUUGUC |
| | CAAAAGACCTT | | OMe + | | | AAGGCUA |
| | TTrUrArArUrUrUr | | 1xOMe | | | UUGGUCA |
| | CrUrArCrUrCrUrU | | | | | (SEQ ID |
| | rGrUrArGrArUrCr | | | | | NO: 1254) |
| | CrUrUrGrUrCrArA | | | | | |
| | rGrGrCrUrArUrUr | | | | | |
| | GrGrUmC/PS2/mA | | | | | |
| 1051 | ATGTGTTTTTGT | +25 DNA | 1xPS- | 66 | 21 | CCUUGUC |
| | CAAAAGACCTT | | OMe | | | AAGGCUA |
| | TTrUrArArUrUrUr | | | | | UUGGUCA |
| | CrUrArCrUrCrUrU | | | | | (SEQ ID |
| | rGrUrArGrArUrCr | | | | | NO: 1254) |
| | CrUrUrGrUrCrArA | | | | | |
| | rGrGrCrUrArUrUr | | | | | |
| | GrGrUrC*mA | | | | | |
| 1052 | TTTTTGTCAAAA | +20 DNA | − | 60 | 20 | CCUUGUC |
| | GACCTTTTrUrAr | | | | | AAGGCUA |
| | ArUrUrUrCrUrArC | | | | | UUGGUC |
| | rUrCrUrUrGrUrAr | | | | | (SEQ ID |
| | GrArUrCrCrUrUrG | | | | | NO: 1002) |
| | rUrCrArArGrGrCr | | | | | |
| | UrArUrUrGrGrUrC | | | | | |
| 1053 | GCTTCATGTGTT | +30 DNA | − | 70 | 20 | CCUUGUC |
| | TTTGTCAAAAG | | | | | AAGGCUA |
| | ACCTTTTrUrArAr | | | | | UUGGUC |
| | UrUrUrCrUrArCrU | | | | | (SEQ ID |
| | rCrUrUrGrUrArGr | | | | | NO: 1002) |
| | ArUrCrCrUrUrGrU | | | | | |
| | rCrArArGrGrCrUr | | | | | |
| | ArUrUrGrGrUrC | | | | | |
| 1054 | GCCGGTTTTTTA | +50 DNA | − | 90 | 20 | CCUUGUC |
| | GTCGTGCTGCTT | | | | | AAGGCUA |
| | CATGTGTTTTTG | | | | | UUGGUC |
| | TCAAAAGACCT | | | | | (SEQ ID |
| | TTTrUrArArUrUr | | | | | NO: 1002) |
| | UrCrUrArCrUrCrU | | | | | |
| | rUrGrUrArGrArUr | | | | | |
| | CrCrUrUrGrUrCrA | | | | | |
| | rArGrGrCrUrArUr | | | | | |
| | UrGrGrUrC | | | | | |
| 1055 | TAGTCGTGCTGC | +40 DNA | − | 80 | 20 | CCUUGUC |
| | TTCATGTGTTTT | | | | | AAGGCUA |
| | TGTCAAAAGAC | | | | | UUGGUC |
| | CTTTTrUrArArUr | | | | | (SEQ ID |
| | UrUrCrUrArCrUrC | | | | | NO: 1002) |
| | rUrUrGrUrArGrAr | | | | | |
| | UrCrCrUrUrGrUrC | | | | | |
| | rArArGrGrCrUrAr | | | | | |
| | UrUrGrGrUrC | | | | | |
| 1056 | C*C*GAAGTTTT | +20 DNA + | − | 60 | 20 | CCUUGUC |
| | CTTCGGTTTTrUr | 2xPS | | | | AAGGCUA |
| | ArArUrUrUrCrUrA | | | | | UUGGUC |
| | rCrUrCrUrUrGrUr | | | | | (SEQ ID |
| | ArGrArUrCrCrUrU | | | | | NO: 1002) |
| | rGrUrCrArArGrGr | | | | | |
| | CrUrArUrUrGrGrU | | | | | |
| | rC | | | | | |
| 1057 | T*T*TTTCCGAA | +25 DNA + | − | 65 | 20 | CCUUGUC |
| | GTTTTCTTCGGT | 2xPS | | | | AAGGCUA |
| | TTTrUrArArUrUr | | | | | UUGGUC |
| | UrCrUrArCrUrCrU | | | | | (SEQ ID |
| | rUrGrUrArGrArUr | | | | | NO: 1002) |
| | CrCrUrUrGrUrCrA | | | | | |
| | rArGrGrCrUrArUr | | | | | |
| | UrGrGrUrC | | | | | |
| 1058 | A*A*CGCTTTTT | +30 DNA + | − | 70 | 20 | CCUUGUC |
| | CCGAAGTTTTCT | 2xPS | | | | AAGGCUA |
| | TCGGTTTTrUrAr | | | | | UUGGUC |
| | ArUrUrUrCrUrArC | | | | | (SEQ ID |
| | rUrCrUrUrGrUrAr | | | | | NO: 1002) |
| | GrArUrCrCrUrUrG | | | | | |
| | rUrCrArArGrGrCr | | | | | |
| | UrArUrUrGrGrUrC | | | | | |
| 1059 | G*C*GTTGTTTT | +41 DNA + | − | 81 | 20 | CCUUGUC |
| | CAACGCTTTTTC | 2xPS | | | | AAGGCUA |
| | CGAAGTTTTCTT | | | | | UUGGUC |
| | CGGTTTTrUrArAr | | | | | (SEQ ID |
| | UrUrUrCrUrArCrU | | | | | NO: 1002) |
| | rCrUrUrGrUrArGr | | | | | |
| | ArUrCrCrUrUrGrU | | | | | |
| | rCrArArGrGrCrUr | | | | | |
| | ArUrUrGrGrUrC | | | | | |
| 1060 | G*G*CTTCTTTT | +62 DNA + | − | 102 | 20 | CCUUGUC |
| | GAAGCCTTTTTG | 2xPS | | | | AAGGCUA |
| | CGTTGTTTTCAA | | | | | UUGGUC |
| | CGCTTTTTCCGA | | | | | (SEQ ID |
| | AGTTTTCTTCGG | | | | | NO: 1002) |
| | TTTTrUrArArUrUr | | | | | |
| | UrCrUrArCrUrCrU | | | | | |
| | rUrGrUrArGrArUr | | | | | |
| | CrCrUrUrGrUrCrA | | | | | |
| | rArGrGrCrUrArUr | | | | | |
| | UrGrGrUrC | | | | | |
| 1061 | mUrArArUrUrUrC | 1xOMe | − | 40 | 20 | CCUUGUC |
| | rUrArCrUrCrUrUr | | | | | AAGGCUA |
| | GrUrArGrArUrCrC | | | | | UUGGUC |
| | rUrUrGrUrCrArAr | | | | | (SEQ ID |
| | GrGrCrUrArUrUrG | | | | | NO: 1002) |
| | rGrUrC | | | | | |
| 1062 | mU*rArArUrUrUr | 1xPS-OMe | − | 40 | 20 | CCUUGUC |
| | CrUrArCrUrCrUrU | | | | | AAGGCUA |
| | rGrUrArGrArUrCr | | | | | UUGGUC |
| | CrUrUrGrUrCrArA | | | | | (SEQ ID |
| | rGrGrCrUrArUrUr | | | | | NO: 1002) |
| | GrGrUrC | | | | | |
| 1063 | mUmArArUrUrUr | 2xOMe | − | 40 | 20 | CCUUGUC |
| | CrUrArCrUrCrUrU | | | | | AAGGCUA |
| | rGrUrArGrArUrCr | | | | | UUGGUC |
| | CrUrUrGrUrCrArA | | | | | (SEQ ID |
| | rGrGrCrUrArUrUr | | | | | NO: 1002) |
| | GrGrUrC | | | | | |
| 1064 | mU*mA*rArUrUr | 2xPS-OMe | − | 40 | 20 | CCUUGUC |
| | UrCrUrArCrUrCrU | | | | | AAGGCUA |
| | rUrGrUrArGrArUr | | | | | UUGGUC |
| | CrCrUrUrGrUrCrA | | | | | (SEQ ID |
| | rArGrGrCrUrArUr | | | | | NO: 1002) |
| | UrGrGrUrC | | | | | |
| 1065 | mUmAmArUrUrUr | 3xOMe | − | 40 | 20 | CCUUGUC |
| | CrUrArCrUrCrUrU | | | | | AAGGCUA |
| | rGrUrArGrArUrCr | | | | | UUGGUC |
| | CrUrUrGrUrCrArA | | | | | (SEQ ID |
| | rGrGrCrUrArUrUr | | | | | NO: 1002) |
| | GrGrUrC | | | | | |
| 1066 | mU*mA*mA*rUr | 3xPS-OMe | - | 40 | 20 | CCUUGUC |
| | UrUrCrUrArCrUrC | | | | | AAGGCUA |
| | rUrUrGrUrArGrAr | | | | | UUGGUC |
| | UrCrCrUrUrGrUrC | | | | | (SEQ ID |
| | rArArGrGrCrUrAr | | | | | NO: 1002) |
| | UrUrGrGrUrC | | | | | |
| 1067 | A*T*GTGTTTTT | +25 DNA + | - | 65 | 20 | CCUUGUC |
| | GTCAAAAGACC | 2xPS | | | | AAGGCUA |
| | TTTTrUrArArUrUr | | | | | UUGGUC |
| | UrCrUrArCrUrCrU | | | | | (SEQ ID |
| | rUrGrUrArGrArUr | | | | | NO: 1002) |
| | CrCrUrUrGrUrCrA | | | | | |
| | rArGrGrCrUrArUr | | | | | |
| | UrGrGrUrC | | | | | |
| 1068 | A*T*GTGTTTTT | +25 DNA + | 1xPS- | 66 | 21 | CCUUGUC |
| | GTCAAAAGACC | 2xPS | OMe | | | AAGGCUA |
| | TTTTrUrArArUrUr | | | | | UUGGUCA |
| | UrCrUrArCrUrCrU | | | | | (SEQ ID |
| | rUrGrUrArGrArUr | | | | | NO: 1254) |
| | CrCrUrUrGrUrCrA | | | | | |
| | rArGrGrCrUrArUr | | | | | |
| | UrGrGrUrC*mA | | | | | |
| 1069 | rUrArArUrUrUrCr | − | 1xPS- | 41 | 21 | CCUUGUC |
| | UrArCrUrCrUrUrG | | OMe | | | AAGGCUA |
| | rUrArGrArUrCrCr | | | | | UUGGUCA |
| | UrUrGrUrCrArArG | | | | | (SEQ ID |
| | rGrCrUrArUrUrGr | | | | | NO: 1254) |
| | GrUrC*mA | | | | | |
| 1070 | rUrArArUrUrUrCr | − | 1xPS- | 42 | 21 | CCUUGUC |
| | UrArCrUrCrUrUrG | | OMe + | | | AAGGCUA |
| | rUrArGrArUrCrCr | | rU | | | UUGGUCA |
| | UrUrGrUrCrArArG | | | | | (SEQ ID |
| | rGrCrUrArUrUrGr | | | | | NO: 1254) |
| | GrUrCmA*rU | | | | | |
| 1071 | rUrArArUrUrUrCr | − | rU | 41 | 20 | CCUUGUC |
| | UrArCrUrCrUrUrG | | | | | AAGGCUA |
| | rUrArGrArUrCrCr | | | | | UUGGUC |
| | UrUrGrUrCrArArG | | | | | (SEQ ID |
| | rGrCrUrArUrUrGr | | | | | NO: 1002) |
| | GrUrCrU | | | | | |
| 1072 | rUrArArUrUrUrCr | − | rU | 42 | 21 | CCUUGUC |
| | UrArCrUrCrUrUrG | | | | | AAGGCUA |
| | rUrArGrArUrCrCr | | | | | UUGGUCA |
| | UrUrGrUrCrArArG | | | | | (SEQ ID |
| | rGrCrUrArUrUrGr | | | | | NO: 1254) |
| | GrUrCrArU | | | | | |
| 1073 | rUrArArUrUrUrCr | − | rU | 44 | 23 | CCUUGUC |
| | UrArCrUrCrUrUrG | | | | | AAGGCUA |
| | rUrArGrArUrCrCr | | | | | UUGGUCA |
| | UrUrGrUrCrArArG | | | | | AG (SEQ ID |
| | rGrCrUrArUrUrGr | | | | | NO: 1258) |
| | GrUrCrArArGrU | | | | | |
| 1074 | A*T*GTGTTTTT | +25 DNA + | rU | 66 | 20 | CCUUGUC |
| | GTCAAAAGACC | 2xPS | | | | AAGGCUA |
| | TTTTrUrArArUrUr | | | | | UUGGUC |
| | UrCrUrArCrUrCrU | | | | | (SEQ ID |
| | rUrGrUrArGrArUr | | | | | NO: 1002) |
| | CrCrUrUrGrUrCrA | | | | | |
| | rArGrGrCrUrArUr | | | | | |
| | UrGrGrUrCrU | | | | | |
| 1075 | A*T*GTGTTTTT | +25 DNA + | rU | 69 | 23 | CCUUGUC |
| | GTCAAAAGACC | 2xPS | | | | AAGGCUA |
| | TTTTrUrArArUrUr | | | | | UUGGUCA |
| | UrCrUrArCrUrCrU | | | | | AG (SEQ ID |
| | rUrGrUrArGrArUr | | | | | NO: 1258) |
| | CrCrUrUrGrUrCrA | | | | | |
| | rArGrGrCrUrArUr | | | | | |
| | UrGrGrUrCrArArG | | | | | |
| | rU | | | | | |
| 1076 | rUrArArUrUrUrCr | − | − | 41 | 21 | CCUUGUC |
| | UrArCrUrCrUrUrG | | | | | AAGGCUA |
| | rUrArGrArUrCrCr | | | | | UUGGUCA |
| | UrUrGrUrCrArArG | | | | | (SEQ ID |
| | rGrCrUrArUrUrGr | | | | | NO: 1254) |
| | GrUrCrA | | | | | |
| 1077 | rUrArArUrUrUrCr | − | − | 43 | 23 | CCUUGUC |
| | UrArCrUrCrUrUrG | | | | | AAGGCUA |
| | rUrArGrArUrCrCr | | | | | UUGGUCA |
| | UrUrGrUrCrArArG | | | | | AG (SEQ ID |
| | rGrCrUrArUrUrGr | | | | | NO: 1258) |
| | GrUrCrArArG | | | | | |
| 1078 | A*T*GTGTTTTT | +25 DNA + | − | 68 | 23 | CCUUGUC |
| | GTCAAAAGACC | 2xPS | | | | AAGGCUA |
| | TTTTrUrArArUrUr | | | | | UUGGUCA |
| | UrCrUrArCrUrCrU | | | | | AG (SEQ ID |
| | rUrGrUrArGrArUr | | | | | NO: 1258) |
| | CrCrUrUrGrUrCrA | | | | | |
| | rArGrGrCrUrArUr | | | | | |
| | UrGrGrUrCrArArG | | | | | |
| 1079 | rUrArArUrUrUrCr | − | 4xrU | 44 | 20 | CCUUGUC |
| | UrArCrUrCrUrUrG | | | | | AAGGCUA |
| | rUrArGrArUrCrCr | | | | | UUGGUC |
| | UrUrGrUrCrArArG | | | | | (SEQ ID |
| | rGrCrUrArUrUrGr | | | | | NO: 1002) |
| | GrUrCrUrUrUrU | | | | | |
| 1080 | rUrArArUrUrUrCr | − | 3xPS- | 44 | 20 | CCUUGUC |
| | UrArCrUrCrUrUrG | | OMe-U + | | | AAGGCUA |
| | rUrArGrArUrCrCr | | rU | | | UUGGUC |
| | UrUrGrUrCrArArG | | | | | (SEQ ID |
| | rGrCrUrArUrUrGr | | | | | NO: 1002) |
| | GrUrCmU*mU*m | | | | | |
| | U*rU | | | | | |
| 1081 | A*T*GTGTTTTT | +25 DNA + | 4xrU | 69 | 20 | CCUUGUC |
| | GTCAAAAGACC | 2xPS | | | | AAGGCUA |
| | TTTTrUrArArUrUr | | | | | UUGGUC |
| | UrCrUrArCrUrCrU | | | | | (SEQ ID |
| | rUrGrUrArGrArUr | | | | | NO: 1002) |
| | CrCrUrUrGrUrCrA | | | | | |
| | rArGrGrCrUrArUr | | | | | |
| | UrGrGrUrCrUrUrU | | | | | |
| | rU | | | | | |
| 1082 | AAAAAAAAAAA | +25 A | 1xPS- | 66 | 21 | CCUUGUC |
| | AAAAAAAAAAA | | OMe | | | AAGGCUA |
| | AAArUrArArUrUr | | | | | UUGGUCA |
| | UrCrUrArCrUrCrU | | | | | (SEQ ID |
| | rUrGrUrArGrArUr | | | | | NO: 1254) |
| | CrCrUrUrGrUrCrA | | | | | |
| | rArGrGrCrUrArUr | | | | | |
| | UrGrGrUrC*mA | | | | | |
| 1083 | TTTTTTTTTTTTT | +25 T | 1xPS- | 66 | 21 | CCUUGUC |
| | TTTTTTTTTTTTr | | OMe | | | AAGGCUA |
| | UrArArUrUrUrCrU | | | | | UUGGUCA |
| | rArCrUrCrUrUrGr | | | | | (SEQ ID |
| | UrArGrArUrCrCrU | | | | | NO: 1254) |
| | rUrGrUrCrArArGr | | | | | |
| | GrCrUrArUrUrGrG | | | | | |
| | rUrC*mA | | | | | |
| 1084 | C*C*GAAGTTTT | +20 DNA + | 1xPS- | 61 | 21 | CCUUGUC |
| | CTTCGGTTTTrUr | 2xPS | OMe | | | AAGGCUA |
| | ArArUrUrUrCrUrA | | | | | UUGGUCA |
| | rCrUrCrUrUrGrUr | | | | | (SEQ ID |
| | ArGrArUrCrCrUrU | | | | | NO: 1254) |
| | rGrUrCrArArGrGr | | | | | |
| | CrUrArUrUrGrGrU | | | | | |
| | rC*mA | | | | | |
| 1085 | rUrArArUrUrUrCr | − | 1xPS- | 41 | 21 | AGACAGA |
| | UrArCrUrCrUrUrG | | OMe | | | UAUUUGC |
| | rUrArGrArUrArGr | | | | | AUUGAGA |
| | ArCrArGrArUrArU | | | | | (SEQ ID |
| | rUrUrGrCrArUrUr | | | | | NO: 1260) |
| | GrArG*mA | | | | | |
| 1086 | ATGTGTTTTTGT | +25 DNA | 1xPS- | 66 | 21 | AGACAGA |
| | CAAAAGACCTT | | OMe | | | UAUUUGC |
| | TTrUrArArUrUrUr | | | | | AUUGAGA |
| | CrUrArCrUrCrUrU | | | | | (SEQ ID |
| | rGrUrArGrArUrAr | | | | | NO: 1260) |
| | GrArCrArGrArUrA | | | | | |
| | rUrUrUrGrCrArUr | | | | | |
| | UrGrArG*mA | | | | | |
| 1087 | C*C*GAAGTTTT | +20 DNA + | 1xPS- | 61 | 21 | AGACAGA |
| | CTTCGGTTTTrUr | 2xPS | OMe | | | UAUUUGC |
| | ArArUrUrUrCrUrA | | | | | AUUGAGA |
| | rCrUrCrUrUrGrUr | | | | | (SEQ ID |
| | ArGrArUrArGrArC | | | | | NO: 1260) |
| | rArGrArUrArUrUr | | | | | |
| | UrGrCrArUrUGrAr | | | | | |
| | G*mA | | | | | |
| 1088 | rUrArArUrUrUrCr | − | 1xPS- | 41 | 21 | CAUUGAG |
| | UrArCrUrCrUrUrG | | OMe | | | AUAGUGU |
| | rUrArGrArUrCrAr | | | | | GGGGAAG |
| | UrUrGrArGrArUr | | | | | |
| | ArGrUrGrUrGrGr | | | | | (SEQ ID |
| | GrGrArA*mG | | | | | NO: 1262) |
| 1089 | ATGTGTTTTTGT | +25 DNA | 1xPS- | 66 | 21 | CAUUGAG |
| | CAAAAGACCTT | | OMe | | | AUAGUGU |
| | TTrUrArArUrUrUr | | | | | GGGGAAG |
| | CrUrArCrUrCrUrU | | | | | (SEQ ID |
| | rGrUrArGrArUrCr | | | | | NO: 1262) |
| | ArUrUrGrArGrAr | | | | | |
| | UrArGrUrGrUrGr | | | | | |
| | GrGrGrArA*mG | | | | | |
| 1090 | C*C*GAAGTTTT | +20 DNA + | 1xPS- | 61 | 21 | CAUUGAG |
| | CTTCGGTTTTrUr | 2xPS | OMe | | | AUAGUGU |
| | ArArUrUrUrCrUrA | | | | | GGGGAAG |
| | rCrUrCrUrUrGrUr | | | | | (SEQ ID |
| | ArGrArUrCrArUrU | | | | | NO: 1262) |
| | rGrArGrArUrArGr | | | | | |
| | UrGrUrGrGrGrGr | | | | | |
| | ArA*mG | | | | | |
| 1091 | rUrArArUrUrUrCr | − | 1xPS- | 41 | 21 | CUUCUCC |
| | UrArCrUrCrUrUrG | | OMe | | | CAUCAUA |
| | rUrArGrArUrCrUr | | | | | GAGGAUA |
| | UrCrUrCrCrCrArU | | | | | (SEQ ID |
| | rCrArUrArGrArGr | | | | | NO: 1264) |
| | GrArU*mA | | | | | |
| 1092 | ATGTGTTTTTGT | +25 DNA | 1xPS- | 66 | 21 | CUUCUCC |
| | CAAAAGACCTT | | OMe | | | CAUCAUA |
| | TTrUrArArUrUrUr | | | | | GAGGAUA |
| | CrUrArCrUrCrUrU | | | | | (SEQ ID |
| | rGrUrArGrArUrCr | | | | | NO: 1264) |
| | UrUrCrUrCrCrCrA | | | | | |
| | rUrCrArUrArGrAr | | | | | |
| | GrGrArU*mA | | | | | |
| 1093 | C*C*GAAGTTTT | +20 DNA + | 1xPS- | 61 | 21 | CUUCUCC |
| | CTTCGGTTTTrUr | 2xPS | OMe | | | CAUCAUA |
| | ArArUrUrUrCrUrA | | | | | GAGGAUA |
| | rCrUrCrUrUrGrUr | | | | | (SEQ ID |
| | ArGrArUrCrUrUrC | | | | | NO: 1264) |
| | rUrCrCrCrArUrCr | | | | | |
| | ArUrArGrArGrGr | | | | | |
| | ArU*mA | | | | | |
| 1098 | A*T*GTGTTTTT | +25 DNA + | 1xPS- | 67 | 21 | CCUUGUC |
| | GTCAAAAGACC | 2xPS | OMe + | | | AAGGCUA |
| | TTTTrUrArArUrUr | | rU | | | UUGGUCA |
| | UrCrUrArCrUrCrU | | | | | (SEQ ID |
| | rUrGrUrArGrArUr | | | | | NO: 1254) |
| | CrCrUrUrGrUrCrA | | | | | |
| | rArGrGrCrUrArUr | | | | | |
| | UrGrGrUrCmA*rU | | | | | |
| 1099 | A*T*GTGTTTTT | +25 DNA + | 2×PS- | 68 | 22 | CCUUGUC |
| | GTCAAAAGACC | 2xPS | OMe + | | | AAGGCUA |
| | TTTTrUrArArUrUr | | rU | | | UUGGUCA |
| | UrCrUrArCrUrCrU | | | | | A (SEQ ID |
| | rUrGrUrArGrArUr | | | | | NO: 1256) |
| | CrCrUrUrGrUrCrA | | | | | |
| | rArGrGrCrUrArUr | | | | | |
| | UrGrGrUrCmA*m | | | | | |
| | A*rU | | | | | |
| 1100 | A*T*GTGTTTTT | +25 DNA + | 1xPS- | 66 | 20 | CCUUGUC |
| | GTCAAAAGACC | 2xPS | OMe + | | | AAGGCUA |
| | TTTTrUrArArUrUr | | rU | | | UUGGUC |
| | UrCrUrArCrUrCrU | | | | | (SEQ ID |
| | rUrGrUrArGrArUr | | | | | NO: 1002) |
| | CrCrUrUrGrUrCrA | | | | | |
| | rArGrGrCrUrArUr | | | | | |
| | UrGrGrUmC*rU | | | | | |
| 1101 | A*T*GTGTTTTT | +25 DNA + | 1xPS- | 65 | 20 | CCUUGUC |
| | GTCAAAAGACC | 2xPS | OMe | | | AAGGCUA |
| | TTTTrUrArArUrUr | | | | | UUGGUC |
| | UrCrUrArCrUrCrU | | | | | (SEQ ID |
| | rUrGrUrArGrArUr | | | | | NO: 1002) |
| | CrCrUrUrGrUrCrA | | | | | |
| | rArGrGrCrUrArUr | | | | | |
| | UrGrGrU*mC | | | | | |
| 1102 | A*T*GTGTTTTT | +25 DNA + | 2xPS- | 67 | 22 | CCUUGUC |
| | GTCAAAAGACC | 2xPS | OMe | | | AAGGCUA |
| | TTTTrUrArArUrUr | | | | | UUGGUCA |
| | UrCrUrArCrUrCrU | | | | | A (SEQ ID |
| | rUrGrUrArGrArUr | | | | | NO: 1256) |
| | CrCrUrUrGrUrCrA | | | | | |
| | rArGrGrCrUrArUr | | | | | |
| | UrGrGrUrC*mA* | | | | | |
| | mA | | | | | |
| 1103 | mA*mU*rGrUrGr | +25 DNA + | 1xPS- | 66 | 21 | CCUUGUC |
| | UrUrUrUrUrGrUrC | 2xPS | OMe | | | AAGGCUA |
| | rArArArArGrArCr | | | | | UUGGUCA |
| | CrUrUrUrUrUrArA | | | | | (SEQ ID |
| | rUrUrUrCrUrArCr | | | | | NO: 1254) |
| | UrCrUrUrGrUrArG | | | | | |
| | rArUrCrCrUrUrGr | | | | | |
| | UrCrArArGrGrCrU | | | | | |
| | rArUrUrGrGrUrC* | | | | | |
| | mA | | | | | |
| 1104 | mA*mA*rArArAr | PolyA | 1xPS- | 66 | 21 | CCUUGUC |
| | ArArArArArArAr | RNA + | OMe | | | AAGGCUA |
| | Ar ArArArArArAr | 2xPS | | | | UUGGUCA |
| | ArArArArArArUr | | | | | (SEQ ID |
| | ArArUrUrUrCrUrA | | | | | NO: 1254) |
| | rCrUrCrUrUrGrUr | | | | | |
| | ArGrArUrCrCrUrU | | | | | |
| | rGrUrCrArArGrGr | | | | | |
| | CrUrArUrUrGrGrU | | | | | |
| | rC*mA | | | | | |
| 1105 | mU*mU*rUrUrUr | PolyU | 1xPS- | 66 | 21 | CCUUGUC |
| | UrUrUrUrUrUrUr | RNA + | OMe | | | AAGGCUA |
| | UrUrUrUrUrUrUr | 2xPS | | | | UUGGUCA |
| | UrUrUrUrUrUrUr | | | | | (SEQ ID |
| | ArArUrUrUrCrUrA | | | | | NO: 1254) |
| | rCrUrCrUrUrGrUr | | | | | |
| | ArGrArUrCrCrUrU | | | | | |
| | rGrUrCrArArGrGr | | | | | |
| | CrUrArUrUrGrGrU | | | | | |
| | rC*mA | | | | | |

All bases are in upper case
Lowercase “r” represents RNA, 2′-hydroxy; bases not modified by an “r” are DNA
All bases are linked via standard phosphodiester bonds except as noted:
“*” represents phosphorothioate modification
“PS” represents phosphorothioate modification
“PS2” represents phosphorodithioate modification
“OMe” represents a 2′-o-methyl modification
“m” represents a 2′-o-methyl modification
**Table 18 provides a listing of the sequences of the gRNA 5′ extensions

TABLE 24
Sp35 RNP and RNP58 Indels

| | “% in | “% in | | | | |
|---|---|---|---|---|---|---|
| | indel” | indel” | | Genomic | Genomic | HBG1 and |
| | SpCas9 | Cpf1 | | Coordinates | Coordinates | HBG2 |
| Indel_id | (Sp35 RNP) | (RNP58) | MMEJ | at HBG1 | at HBG2 | Position |
| 159_-18_NA | 0.013503714 | 0.185309532 | True | chr11: 5,249,961- | chr11: 5,254,885- | HBG1/2 c. −104 to −121 |
| | | | | 5,249,978 | 5,254,902 | |
| 165_-6_NA | 0.011778239 | 0.050633257 | False | chr11: 5,249,967- | chr11: 5,254,891- | HBG1/2 c. −110 to −115 |
| | | | | 5,249,972 | 5,254,896 | |
| 167_-4_NA | 0.046087674 | 0.049159297 | False | chr11: 5,249,969- | chr11: 5,254,893- | HBG1/2 c. −112 to −115 |
| | | | | 5,249,972 | 5,254,896 | |
| 168_-3_NA | 0.072269874 | 0.044737417 | False | chr11: 5,249,970- | chr11: 5,254,894- | HBG1/2 c. −113 to −115 |
| | | | | 5,249,972 | 5,254,896 | |
| 157_-13_NA | 0.318812673 | 0.033628125 | True | chr11: 5,249,959- | chr11: 5,254,883- | HBG1/2 c. −102 to −114 |
| | | | | 5,249,971 | 5,254,895 | |
| 166_-7_NA | 0.001100303 | 0.027923354 | False | chr11: 5,249,968- | chr11: 5,254,892- | HBG1/2 c. −111 to −117 |
| | | | | 5,249,974 | 5,254,898 | |
| 166_-5_NA | 0.007076946 | 0.025412163 | False | chr11: 5,249,968- | chr11: 5,254,892- | HBG1/2 c. −111 to −115 |
| | | | | 5,249,972 | 5,254,896 | |
| 169_-5_NA | 0.000775213 | 0.024948138 | False | chr11: 5,249,971- | chr11: 5,254,895- | HBG1/2 c. −114 to −118 |
| | | | | 5,249,975 | 5,254,899 | |
| 168_-5_NA | 0.000475131 | 0.018288023 | False | chr11: 5,249,970- | chr11: 5,254,894- | HBG1/2 c. −113 to −117 |
| | | | | 5,249,974 | 5,254,898 | |
| 169_-4_NA | 0.001400385 | 0.017605634 | False | chr11: 5,249,971- | chr11: 5,254,895- | HBG1/2 c. −114 to −117 |
| | | | | 5,249,974 | 5,254,898 | |
| 167_-5_NA | 0.000700193 | 0.014548531 | False | chr11: 5,249,969- | chr11: 5,254,893- | HBG1/2 c. −112 to −116 |
| | | | | 5,249,973 | 5,254,897 | |
| 164_-8_NA | 0.002275626 | 0.01375696 | False | chr11: 5,249,966- | chr11: 5,254,890- | HBG1/2 c. −109 to −116 |
| | | | | 5,249,973 | 5,254,897 | |
| 166_-8_NA | 0.000625172 | 0.011982749 | False | chr11: 5,249,968- | chr11: 5,254,892- | HBG1/2 c. −111 to −118 |
| | | | | 5,249,975 | 5,254,899 | |
| 166_-12_NA | 0.000300083 | 0.01031772 | False | chr11: 5,249,968- | chr11: 5,254,892- | HBG1/2 c. −111 to −122 |
| | | | | 5,249,979 | 5,254,903 | |
| 169_-2_NA | 0.084173148 | 0.010263129 | False | chr11: 5,249,971- | chr11: 5,254,895- | HBG1/2 c. −114 to −115 |
| | | | | 5,249,972 | 5,254,896 | |
| 167_-6_NA | 0.000500138 | 0.008952942 | False | chr11: 5,249,969- | chr11: 5,254,893- | HBG1/2 c. −112 to −117 |
| | | | | 5,249,974 | 5,254,898 | |
| 157_-18_NA | 0.001650454 | 0.008024894 | False | chr11: 5,249,959- | chr11: 5,254,883- | HBG1/2 c. −102 to −119 |
| | | | | 5,249,976 | 5,254,900 | |
| 166_-13_NA | 0.012028308 | 0.006960367 | False | chr11: 5,249,968- | chr11: 5,254,892- | HBG1/2 c. −111 to −123 |
| | | | | 5,249,980 | 5,254,904 | |
| 168_-10_NA | 0.000050014 | 0.006359865 | False | chr11: 5,249,970- | chr11: 5,254,894- | HBG1/2 c. −113 to −122 |
| | | | | 5,249,979 | 5,254,903 | |
| 162_-22_NA | 0.001050289 | 0.006086909 | True | chr11: 5,249,964- | chr11: 5,254,888- | HBG1/2 c. −107 to −128 |
| | | | | 5,249,985 | 5,254,909 | |
| 169_-8_NA | 0.000100028 | 0.00589584 | False | chr11: 5,249,971- | chr11: 5,254,895- | HBG1/2 c. −114 to −121 |
| | | | | 5,249,978 | 5,254,902 | |
| 169_-9_NA | 0.000050014 | 0.005868545 | False | chr11: 5,249,971- | chr11: 5,254,895- | HBG1/2 c. −114 to −122 |
| | | | | 5,249,979 | 5,254,903 | |
| 165_-7_NA | 0.000425117 | 0.005704771 | False | chr11: 5,249,967- | chr11: 5,254,891- | HBG1/2 c. −110 to −116 |
| | | | | 5,249,973 | 5,254,897 | |
| 169_-7_NA | 0.000325089 | 0.005677476 | False | chr11: 5,249,971- | chr11: 5,254,895- | HBG1/2 c. −114 to −120 |
| | | | | 5,249,977 | 5,254,901 | |
| 168_-8_NA | 0.000200055 | 0.005349929 | False | chr11: 5,249,970- | chr11: 5,254,894- | HBG1/2 c. −113 to −120 |
| | | | | 5,249,977 | 5,254,901 | |
| 170_-2_NA | 0.001025282 | 0.00515886 | False | chr11: 5,249,972- | chr11: 5,254,896- | HBG1/2 c. −115 to −116 |
| | | | | 5,249,973 | 5,254,897 | |
| 168_-9_NA | 0 | 0.005022382 | False | chr11: 5,249,970- | chr11: 5,254,894- | HBG1/2 c. −113 to −121 |
| | | | | 5,249,978 | 5,254,902 | |
| 168_-6_NA | 0.000150041 | 0.004967791 | False | chr11: 5,249,970- | chr11: 5,254,894- | HBG1/2 c. −113 to −118 |
| | | | | 5,249,975 | 5,254,899 | |
| 169_-10_NA | 0.000050014 | 0.004858609 | False | chr11: 5,249,971- | chr11: 5,254,895- | HBG1/2 c. −114 to −123 |
| | | | | 5,249,980 | 5,254,904 | |
| 166_-11_NA | 0.000025007 | 0.004749427 | False | chr11: 5,249,968- | chr11: 5,254,892- | HBG1/2 c. −111 to −121 |
| | | | | 5,249,978 | 5,254,902 | |
| 164_-23_NA | 0.000125034 | 0.004722131 | False | chr11: 5,249,966- | chr11: 5,254,890- | HBG1/2 c. −109 to −131 |
| | | | | 5,249,988 | 5,254,912 | |
| 166_-10_NA | 0.000050014 | 0.00417622 | False | chr11: 5,249,968- | chr11: 5,254,892- | HBG1/2 c. −111 to −120 |
| | | | | 5,249,977 | 5,254,901 | |
| 167_-11_NA | 0 | 0.004039742 | False | chr11: 5,249,969- | chr11: 5,254,893- | HBG1/2 c. −112 to −122 |
| | | | | 5,249,979 | 5,254,903 | |
| 168_-7_NA | 0.000125034 | 0.003957856 | False | chr11: 5,249,970- | chr11: 5,254,894- | HBG1/2 c. −113 to −119 |
| | | | | 5,249,976 | 5,254,900 | |
| 168_-11_NA | 0.000125034 | 0.003794082 | False | chr11: 5,249,970- | chr11: 5,254,894- | HBG1/2 c. −113 to −123 |
| | | | | 5,249,980 | 5,254,904 | |
| 166_-9_NA | 0.000025007 | 0.003766787 | False | chr11: 5,249,968- | chr11: 5,254,892- | HBG1/2 c. −111 to −119 |
| | | | | 5,249,976 | 5,254,900 | |
| 167_-1_NA | 0.000975268 | 0.0036849 | False | chr11: 5,249,969- | chr11: 5,254,893- | HBG1/2 c. −112 to −112 |
| | | | | 5,249,969 | 5,254,893 | |
| 168_-2_NA | 0.003325915 | 0.003575718 | False | chr11: 5,249,970- | chr11: 5,254,894- | HBG1/2 c. −113 to −114 |
| | | | | 5,249,971 | 5,254,895 | |
| 167_-9_NA | 0.000075021 | 0.003521127 | False | chr11: 5,249,969- | chr11: 5,254,893- | HBG1/2 c. −112 to −120 |
| | | | | 5,249,977 | 5,254,901 | |
| 168_-12_NA | 0.000200055 | 0.003521127 | False | chr11: 5,249,970- | chr11: 5,254,894- | HBG1/2 c. −113 to −124 |
| | | | | 5,249,981 | 5,254,905 | |
| 166_-15_NA | 0.000050014 | 0.003493831 | False | chr11: 5,249,968- | chr11: 5,254,892- | HBG1/2 c. −111 to −125 |
| | | | | 5,249,982 | 5,254,906 | |
| 162_-7_NA | 0.005901623 | 0.00343924 | True | chr11: 5,249,964- | chr11: 5,254,888- | HBG1/2 c. −107 to −113 |
| | | | | 5,249,970 | 5,254,894 | |
| 169_-12_NA | 0.001775488 | 0.003384649 | False | chr11: 5,249,971- | chr11: 5,254,895- | HBG1/2 c. −114 to −125 |
| | | | | 5,249,982 | 5,254,906 | |
| 168_-13_NA | 0.001000275 | 0.003357353 | False | chr11: 5,249,970- | chr11: 5,254,894- | HBG1/2 c. −113 to −125 |
| | | | | 5,249,982 | 5,254,906 | |
| 166_-4_NA | 0.001000275 | 0.003111693 | False | chr11: 5,249,968- | chr11: 5,254,892- | HBG1/2 c. −111 to −114 |
| | | | | 5,249,971 | 5,254,895 | |
| 167_-10_NA | 0.000050014 | 0.003057102 | False | chr11: 5,249,969- | chr11: 5,254,893- | HBG1/2 c. −112 to −121 |
| | | | | 5,249,978 | 5,254,902 | |
| 169_-13_NA | 0.001500413 | 0.002756851 | False | chr11: 5,249,971- | chr11: 5,254,895- | HBG1/2 c. −114 to −126 |
| | | | | 5,249,983 | 5,254,907 | |
| 157_-19_NA | 0.000075021 | 0.002483896 | False | chr11: 5,249,959- | chr11: 5,254,883- | HBG1/2 c. −102 to −120 |
| | | | | 5,249,977 | 5,254,901 | |
| 166_-14_NA | 0.000025007 | 0.0024566 | False | chr11: 5,249,968- | chr11: 5,254,892- | HBG1/2 c. −111 to −124 |
| | | | | 5,249,981 | 5,254,905 | |
| 158_-14_NA | 0.000050014 | 0.002429305 | False | chr11: 5,249,960- | chr11: 5,254,884- | HBG1/2 c. −103 to −116 |
| | | | | 5,249,973 | 5,254,897 | |
| 167_-3_NA | 0.002700743 | 0.002402009 | False | chr11: 5,249,969- | chr11: 5,254,893- | HBG1/2 c. −112 to −114 |
| | | | | 5,249,971 | 5,254,895 | |
| 163_-9_NA | 0.000200055 | 0.002265531 | False | chr11: 5,249,965- | chr11: 5,254,889- | HBG1/2 c. −108 to −116 |
| | | | | 5,249,973 | 5,254,897 | |
| 162_-8_NA | 0.006076671 | 0.002156349 | False | chr11: 5,249,964- | chr11: 5,254,888- | HBG1/2 c. −107 to −114 |
| | | | | 5,249,971 | 5,254,895 | |
| 168_-14_NA | 0 | 0.002129053 | False | chr11: 5,249,970- | chr11: 5,254,894- | HBG1/2 c. −113 to −126 |
| | | | | 5,249,983 | 5,254,907 | |
| 167_-16_NA | 0.000050014 | 0.00196528 | False | chr11: 5,249,969- | chr11: 5,254,893- | HBG1/2 c. −112 to −127 |
| | | | | 5,249,984 | 5,254,908 | |
| 166_-16_NA | 0 | 0.001910689 | False | chr11: 5,249,968- | chr11: 5,254,892- | HBG1/2 c. −111 to −126 |
| | | | | 5,249,983 | 5,254,907 | |
| 169_-14_NA | 0.000125034 | 0.001910689 | False | chr11: 5,249,971- | chr11: 5,254,895- | HBG1/2 c. −114 to −127 |
| | | | | 5,249,984 | 5,254,908 | |
| 165_-3_NA | 0.000925254 | 0.001883393 | False | chr11: 5,249,967- | chr11: 5,254,891- | HBG1/2 c. −110 to −112 |
| | | | | 5,249,969 | 5,254,893 | |
| 157_-23_NA | 0.000100028 | 0.001856098 | False | chr11: 5,249,959- | chr11: 5,254,883- | HBG1/2 c. −102 to −124 |
| | | | | 5,249,981 | 5,254,905 | |
| 165_-14_NA | 0.000025007 | 0.001856098 | False | chr11: 5,249,967- | chr11: 5,254,891- | HBG1/2 c. −110 to −123 |
| | | | | 5,249,980 | 5,254,904 | |
| 166_-27_NA | 0.000225062 | 0.00171962 | True | chr11: 5,249,968- | chr11: 5,254,892- | HBG1/2 c. −111 to −137 |
| | | | | 5,249,994 | 5,254,918 | |
| 165_-9_NA | 0.000200055 | 0.001692324 | False | chr11: 5,249,967- | chr11: 5,254,891- | HBG1/2 c. −110 to −118 |
| | | | | 5,249,975 | 5,254,899 | |
| 167_-18_NA | 0.000250069 | 0.001665029 | False | chr11: 5,249,969- | chr11: 5,254,893- | HBG1/2 c. −112 to −129 |
| | | | | 5,249,986 | 5,254,910 | |
| 156_-27_NA | 0 | 0.001610438 | True | chr11: 5,249,958- | chr11: 5,254,882- | HBG1/2 c. −101 to −127 |
| | | | | 5,249,984 | 5,254,908 | |
| 165_-2_NA | 0.000425117 | 0.001610438 | False | chr11: 5,249,967- | chr11: 5,254,891- | HBG1/2 c. −110 to −111 |
| | | | | 5,249,968 | 5,254,892 | |
| 150_-21_NA | 0.000225062 | 0.001583142 | False | chr11: 5,249,952- | chr11: 5,254,876- | HBG1/2 c. −95 to −115 |
| | | | | 5,249,972 | 5,254,896 | |
| 152_-24_NA | 0.000225062 | 0.001583142 | True | chr11: 5,249,954- | chr11: 5,254,878- | HBG1/2 c. −97 to −120 |
| | | | | 5,249,977 | 5,254,901 | |
| 165_-12_NA | 0.000225062 | 0.001583142 | False | chr11: 5,249,967- | chr11: 5,254,891- | HBG1/2 c. −110 to −121 |
| | | | | 5,249,978 | 5,254,902 | |
| 167_-2_NA | 0.000850234 | 0.001583142 | False | chr11: 5,249,969- | chr11: 5,254,893- | HBG1/2 c. −112 to −113 |
| | | | | 5,249,970 | 5,254,894 | |
| 164_-9_NA | 0.000150041 | 0.001555847 | False | chr11: 5,249,966- | chr11: 5,254,890- | HBG1/2 c. −109 to −117 |
| | | | | 5,249,974 | 5,254,898 | |
| 165_-11_NA | 0.000025007 | 0.001528551 | False | chr11: 5,249,967- | chr11: 5,254,891- | HBG1/2 c. −110 to −120 |
| | | | | 5,249,977 | 5,254,901 | |
| 159_-28_NA | 0.000125034 | 0.001501256 | True | chr11: 5,249,961- | chr11: 5,254,885- | HBG1/2 c. −104 to −131 |
| | | | | 5,249,988 | 5,254,912 | |
| 169_-6_NA | 0.013753782 | 0.001501256 | True | chr11: 5,249,971- | chr11: 5,254,895- | HBG1/2 c. −114 to −119 |
| | | | | 5,249,976 | 5,254,900 | |
| 160_-12_NA | 0.000050014 | 0.00147396 | False | chr11: 5,249,962- | chr11: 5,254,886- | HBG1/2 c. −105 to −116 |
| | | | | 5,249,973 | 5,254,897 | |
| 145_-32_NA | 0.001125309 | 0.001446664 | True | chr11: 5,249,947- | chr11: 5,254,871- | HBG1/2 c. −90 to −121 |
| | | | | 5,249,978 | 5,254,902 | |
| 169_-1_NA | 0.096276476 | 0.001446664 | False | chr11: 5,249,971- | chr11: 5,254,895- | HBG1/2 c. −114 to −114 |
| | | | | 5,249,971 | 5,254,895 | |
| 163_-10_NA | 0.000125034 | 0.001419369 | False | chr11: 5,249,965- | chr11: 5,254,889- | HBG1/2 c. −108 to −117 |
| | | | | 5,249,974 | 5,254,898 | |
| 152_-33_NA | 0.000200055 | 0.001392073 | True | chr11: 5,249,954- | chr11: 5,254,878- | HBG1/2 c. −97 to −129 |
| | | | | 5,249,986 | 5,254,910 | |
| 156_-15_NA | 0.000750206 | 0.001392073 | False | chr11: 5,249,958- | chr11: 5,254,882- | HBG1/2 c. −101 to −115 |
| | | | | 5,249,972 | 5,254,896 | |
| 167_-14_NA | 0.000075021 | 0.001337482 | False | chr11: 5,249,969- | chr11: 5,254,893- | HBG1/2 c. −112 to −125 |
| | | | | 5,249,982 | 5,254,906 | |
| 158_-16_NA | 0 | 0.001310187 | False | chr11: 5,249,960- | chr11: 5,254,884- | HBG1/2 c. −103 to −118 |
| | | | | 5,249,975 | 5,254,899 | |
| 162_-9_NA | 0.002200605 | 0.001310187 | False | chr11: 5,249,964- | chr11: 5,254,888- | HBG1/2 c. −107 to −115 |
| | | | | 5,249,972 | 5,254,896 | |
| 164_-10_NA | 0.000325089 | 0.001310187 | False | chr11: 5,249,966- | chr11: 5,254,890- | HBG1/2 c. −109 to −118 |
| | | | | 5,249,975 | 5,254,899 | |
| 165_-5_NA | 0.001975543 | 0.001310187 | False | chr11: 5,249,967- | chr11: 5,254,891- | HBG1/2 c. −110 to −114 |
| | | | | 5,249,971 | 5,254,895 | |
| 169_-11_NA | 0.015704319 | 0.001310187 | True | chr11: 5,249,971- | chr11: 5,254,895- | HBG1/2 c. −114 to −124 |
| | | | | 5,249,981 | 5,254,905 | |
| 170_-4_NA | 0.00040011 | 0.001310187 | False | chr11: 5,249,972- | chr11: 5,254,896- | HBG1/2 c. −115 to −118 |
| | | | | 5,249,975 | 5,254,899 | |
| 152_-29_NA | 0.000450124 | 0.001282891 | True | chr11: 5,249,954- | chr11: 5,254,878- | HBG1/2 c. −97 to −125 |
| | | | | 5,249,982 | 5,254,906 | |
| 161_-11_NA | 0 | 0.0012283 | False | chr11: 5,249,963- | chr11: 5,254,887- | HBG1/2 c. −106 to −116 |
| | | | | 5,249,973 | 5,254,897 | |
| 169_-18_NA | 0.000100028 | 0.0012283 | False | chr11: 5,249,971- | chr11: 5,254,895- | HBG1/2 c. −114 to −131 |
| | | | | 5,249,988 | 5,254,912 | |
| 164_-27_NA | 0.000275076 | 0.001201004 | False | chr11: 5,249,966- | chr11: 5,254,890- | HBG1/2 c. −109 to −135 |
| | | | | 5,249,992 | 5,254,916 | |
| 168_-18_NA | 0.000100028 | 0.001201004 | False | chr11: 5,249,970- | chr11: 5,254,894- | HBG1/2 c. −113 to −130 |
| | | | | 5,249,987 | 5,254,911 | |
| 168_-23_NA | 0 | 0.001201004 | False | chr11: 5,249,970- | chr11: 5,254,894- | HBG1/2 c. −113 to −135 |
| | | | | 5,249,992 | 5,254,916 | |
| 150_-33_NA | 0.000150041 | 0.001173709 | False | chr11: 5,249,952- | chr11: 5,254,876- | HBG1/2 c. −95 to −127 |
| | | | | 5,249,984 | 5,254,908 | |
| 151_-20_NA | 0.000225062 | 0.001173709 | False | chr11: 5,249,953- | chr11: 5,254,877- | HBG1/2 c. −96 to −115 |
| | | | | 5,249,972 | 5,254,896 | |
| 169_-22_NA | 0.000025007 | 0.001173709 | False | chr11: 5,249,971- | chr11: 5,254,895- | HBG1/2 c. −114 to −135 |
| | | | | 5,249,992 | 5,254,916 | |
| 162_-14_NA | 0.000125034 | 0.001146413 | False | chr11: 5,249,964- | chr11: 5,254,888- | HBG1/2 c. −107 to −120 |
| | | | | 5,249,977 | 5,254,901 | |
| 166_-21_NA | 0.000025007 | 0.001146413 | False | chr11: 5,249,968- | chr11: 5,254,892- | HBG1/2 c. −111 to −131 |
| | | | | 5,249,988 | 5,254,912 | |
| 160_-11_NA | 0.001675461 | 0.001119118 | False | chr11: 5,249,962- | chr11: 5,254,886- | HBG1/2 c. −105 to −115 |
| | | | | 5,249,972 | 5,254,896 | |
| 155_-16_NA | 0.000350096 | 0.001091822 | False | chr11: 5,249,957- | chr11: 5,254,881- | HBG1/2 c. −100 to −115 |
| | | | | 5,249,972 | 5,254,896 | |
| 166_-26_NA | 0 | 0.001091822 | False | chr11: 5,249,968- | chr11: 5,254,892- | HBG1/2 c. −111 to −136 |
| | | | | 5,249,993 | 5,254,917 | |
| 157_-24_NA | 0.000125034 | 0.001064527 | False | chr11: 5,249,959- | chr11: 5,254,883- | HBG1/2 c. −102 to −125 |
| | | | | 5,249,982 | 5,254,906 | |
| 165_-15_NA | 0.000050014 | 0.001064527 | False | chr11: 5,249,967- | chr11: 5,254,891- | HBG1/2 c. −110 to −124 |
| | | | | 5,249,981 | 5,254,905 | |
| 162_-33_NA | 0.000025007 | 0.001037231 | True | chr11: 5,249,964- | chr11: 5,254,888- | HBG1/2 c. −107 to −139 |
| | | | | 5,249,996 | 5,254,920 | |
| 163_-12_NA | 0.000100028 | 0.001037231 | False | chr11: 5,249,965- | chr11: 5,254,889- | HBG1/2 c. −108 to −119 |
| | | | | 5,249,976 | 5,254,900 | |
| 163_-6_NA | 0.001050289 | 0.001009936 | False | chr11: 5,249,965- | chr11: 5,254,889- | HBG1/2 c. −108 to −113 |
| | | | | 5,249,970 | 5,254,894 | |
| 164_-28_NA | 0.000175048 | 0.001009936 | False | chr11: 5,249,966- | chr11: 5,254,890- | HBG1/2 c. −109 to −136 |
| | | | | 5,249,993 | 5,254,917 | |
| 155_-12_NA | 0.001150316 | 0.000928049 | True | chr11: 5,249,957- | chr11: 5,254,881- | HBG1/2 c. −100 to −111 |
| | | | | 5,249,968 | 5,254,892 | |
| 137_-27_NA | 0.003901073 | 0.000846162 | True | chr11: 5,249,939- | chr11: 5,254,863- | HBG1/2 c. −82 to −108 |
| | | | | 5,249,965 | 5,254,889 | |
| 161_-10_NA | 0.001625447 | 0.000655093 | False | chr11: 5,249,963- | chr11: 5,254,887- | HBG1/2 c. −106 to −115 |
| | | | | 5,249,972 | 5,254,896 | |
| 170_-10_NA | 0.001050289 | 0.000545911 | False | chr11: 5,249,972- | chr11: 5,254,896- | HBG1/2 c. −115 to −124 |
| | | | | 5,249,981 | 5,254,905 | |
| 171_-1_NA | 0.018029958 | 0.000464024 | False | chr11: 5,249,973- | chr11: 5,254,897- | HBG1/2 c. −116 to −116 |
| | | | | 5,249,973 | 5,254,897 | |
| 154_-18_NA | 0.001325364 | 0.000327547 | False | chr11: 5,249,956- | chr11: 5,254,880- | HBG1/2 c. −99 to −116 |
| | | | | 5,249,973 | 5,254,897 | |
| 168_-15_NA | 0.007727125 | 0.000300251 | True | chr11: 5,249,970- | chr11: 5,254,894- | HBG1/2 c. −113 to −127 |
| | | | | 5,249,984 | 5,254,908 | |
| 171_-2_NA | 0.003325915 | 0.000191069 | False | chr11: 5,249,973- | chr11: 5,254,897- | HBG1/2 c. −116 to −117 |
| | | | | 5,249,974 | 5,254,898 | |
| 170_1_A | 0.001025282 | 0.000163773 | False | chr11: 5,249,972- | chr11: 5,254,896- | HBG1/2 c. −115 to −113 |
| | | | | 5,249,970 | 5,254,894 | |
| 171_1_C | 0.007877166 | 0.000054591 | False | chr11: 5,249,973- | chr11: 5,254,897- | HBG1/2 c. −116 to −114 |
| | | | | 5,249,971 | 5,254,895 | |
| 169_2_GG | 0.004901348 | 0.000027296 | False | chr11: 5,249,971- | chr11: 5,254,895- | HBG1/2 c. −114 to −111 |
| | | | | 5,249,968 | 5,254,892 | |
| 169_1_G | 0.033684263 | 0 | False | chr11: 5,249,971- | chr11: 5,254,895- | HBG1/2 c. −114 to −112 |
| | | | | 5,249,969 | 5,254,893 | |
| 170_4_CCTT | 0.003876066 | 0 | False | chr11: 5,249,972- | chr11: 5,254,896- | HBG1/2 c. −115 to −110 |
| | | | | 5,249,967 | 5,254,891 | |
| 170_4_GCTT | 0.001450399 | 0 | False | chr11: 5,249,972- | chr11: 5,254,896- | HBG1/2 c. −115 to −110 |
| | | | | 5,249,967 | 5,254,891 | |
| 170_5_GCCTT | 0.001175323 | 0 | False | chr11: 5,249,972- | chr11: 5,254,896- | HBG1/2 c. −115 to −109 |
| | | | | 5,249,966 | 5,254,890 | |
| 170_-301_NA | 0.001225337 | 0 | True | chr11: 5,249,972- | chr11: 5,254,896- | HBG1/2 c. −115 to −415 |
| | | | | 5,250,272 | 5,255,196 | |
| 171_1_A | 0.005251444 | 0 | False | chr11: 5,249,973- | chr11: 5,254,897- | HBG1/2 c. −116 to −114 |
| | | | | 5,249,971 | 5,254,895 | |
| 171_1_T | 0.027407537 | 0 | False | chr11: 5,249,973- | chr11: 5,254,897- | HBG1/2 c. −116 to −114 |
| | | | | 5,249,971 | 5,254,895 | |
| 171_2_CC | 0.007151967 | 0 | False | chr11: 5,249,973- | chr11: 5,254,897- | HBG1/2 c. −116 to −113 |
| | | | | 5,249,970 | 5,254,894 | |
| 171_2_CT | 0.002650729 | 0 | False | chr11: 5,249,973- | chr11: 5,254,897- | HBG1/2 c. −116 to −113 |
| | | | | 5,249,970 | 5,254,894 | |
| 171_2_GA | 0.001050289 | 0 | False | chr11: 5,249,973- | chr11: 5,254,897- | HBG1/2 c. −116 to −113 |
| | | | | 5,249,970 | 5,254,894 | |
| 171_2_TC | 0.003275901 | 0 | False | chr11: 5,249,973- | chr11: 5,254,897- | HBG1/2 c. −116 to −113 |
| | | | | 5,249,970 | 5,254,894 | |
| 171_2_TT | 0.002025557 | 0 | False | chr11: 5,249,973- | chr11: 5,254,897- | HBG1/2 c. −116 to −113 |
| | | | | 5,249,970 | 5,254,894 | |
| 171_3_CCC | 0.001125309 | 0 | False | chr11: 5,249,973- | chr11: 5,254,897- | HBG1/2 c. −116 to −112 |
| | | | | 5,249,969 | 5,254,893 | |

The Indel_id is a string identifying the indel, shown as indel_start_position + _ + indel_length + _ + ID. Where ID is NA for deletions and for insertions is the sequence inserted. Positive values indicate insertions and negative values indicate deletions.
The “% in indel” is the percentage of each indel_ID amongst all indels detected in a sample.
In the column labeled MMEJ, “True” indicates the repair was mediated via MMEJ, and “False” indicates the repair was mediated via NHEJ.
The genomic coordinates at HBG1 or HBG2 are reported using the One-based coordinate system, “Homo sapiens chromosome 11, GRCh38.p12 Primary Assembly,” (Version NC_000011.10), NCBI Reference Sequence NC_000011.
The HBG1/2 position indicates the deletion relative to the TSS.

TABLE 25
RNP32 Indels

| | | | | | Genomic | Genomic | |
|---|---|---|---|---|---|---|---|
| | Ave % | | Cum. | | Coordinates | Coordinates | HBG1/2 |
| Indel Id | in Indel | Cts | Sum | MMEJ | at HBG1 | at HBG2 | position |
| 159_-18_NA | 15.15% | 14 | 15.15% | True | chr11: 5,249,961- | chr11: 5,254,885- | HBG1/2 c. −104 to −121 |
| | | | | | 5,249,978 | 5,254,902 | |
| 165_-6_NA | 5.92% | 14 | 21.07% | False | chr11: 5,249,967- | chr11: 5,254,891- | HBG1/2 c. −110 to −115 |
| | | | | | 5,249,972 | 5,254,896 | |
| 167_-4_NA | 5.53% | 14 | 26.60% | False | chr11: 5,249,969- | chr11: 5,254,893- | HBG1/2 c. −112 to −115 |
| | | | | | 5,249,972 | 5,254,896 | |
| 168_-3_NA | 4.18% | 14 | 30.78% | False | chr11: 5,249,970- | chr11: 5,254,894- | HBG1/2 c. −113 to −115 |
| | | | | | 5,249,972 | 5,254,896 | |
| 166_-5_NA | 3.19% | 14 | 33.97% | False | chr11: 5,249,968- | chr11: 5,254,892- | HBG1/2 c. −111 to −115 |
| | | | | | 5,249,972 | 5,254,896 | |
| 166_-7_NA | 3.10% | 14 | 37.07% | False | chr11: 5,249,968- | chr11: 5,254,892- | HBG1/2 c. −111 to −117 |
| | | | | | 5,249,974 | 5,254,898 | |
| 157_-13_NA | 2.63% | 14 | 39.70% | True | chr11: 5,249,959- | chr11: 5,254,883- | HBG1/2 c. −102 to −114 |
| | | | | | 5,249,971 | 5,254,895 | |
| 169_-5_NA | 2.07% | 14 | 41.77% | False | chr11: 5,249,971- | chr11: 5,254,895- | HBG1/2 c. −114 to −118 |
| | | | | | 5,249,975 | 5,254,899 | |
| 167_-5_NA | 1.72% | 14 | 43.49% | False | chr11: 5,249,969- | chr11: 5,254,893- | HBG1/2 c. −112 to −116 |
| | | | | | 5,249,973 | 5,254,897 | |
| 168_-5_NA | 1.54% | 14 | 45.03% | False | chr11: 5,249,970- | chr11: 5,254,894- | HBG1/2 c. −113 to −117 |
| | | | | | 5,249,974 | 5,254,898 | |
| 169_-4_NA | 1.43% | 14 | 46.46% | False | chr11: 5,249,971- | chr11: 5,254,895- | HBG1/2 c. −114 to −117 |
| | | | | | 5,249,974 | 5,254,898 | |
| 166_-8_NA | 1.41% | 14 | 47.88% | False | chr11: 5,249,968- | chr11: 5,254,892- | HBG1/2 c. −111 to −118 |
| | | | | | 5,249,975 | 5,254,899 | |
| 164_-8_NA | 1.32% | 14 | 49.20% | False | chr11: 5,249,966- | chr11: 5,254,890- | HBG1/2 c. −109 to −116 |
| | | | | | 5,249,973 | 5,254,897 | |
| 166_-12_NA | 1.28% | 14 | 50.48% | False | chr11: 5,249,968- | chr11: 5,254,892- | HBG1/2 c. −111 to −122 |
| | | | | | 5,249,979 | 5,254,903 | |
| 166_-13_NA | 1.10% | 14 | 51.58% | False | chr11: 5,249,968- | chr11: 5,254,892- | HBG1/2 c. −111 to −123 |
| | | | | | 5,249,980 | 5,254,904 | |
| 167_-6_NA | 0.90% | 14 | 52.47% | False | chr11: 5,249,969- | chr11: 5,254,893- | HBG1/2 c. −112 to −117 |
| | | | | | 5,249,974 | 5,254,898 | |
| 169_-2_NA | 0.83% | 14 | 53.30% | False | chr11: 5,249,971- | chr11: 5,254,895- | HBG1/2 c. −114 to −115 |
| | | | | | 5,249,972 | 5,254,896 | |
| 168_-6_NA | 0.80% | 14 | 54.10% | False | chr11: 5,249,970- | chr11: 5,254,894- | HBG1/2 c. −113 to −118 |
| | | | | | 5,249,975 | 5,254,899 | |
| 166_-10_NA | 0.72% | 14 | 54.82% | False | chr11: 5,249,968- | chr11: 5,254,892- | HBG1/2 c. −111 to −120 |
| | | | | | 5,249,977 | 5,254,901 | |
| 169_-9_NA | 0.69% | 14 | 55.51% | False | chr11: 5,249,971- | chr11: 5,254,895- | HBG1/2 c. −114 to −122 |
| | | | | | 5,249,979 | 5,254,903 | |
| 168_-8_NA | 0.65% | 14 | 56.16% | False | chr11: 5,249,970- | chr11: 5,254,894- | HBG1/2 c. −113 to −120 |
| | | | | | 5,249,977 | 5,254,901 | |
| 169_-8_NA | 0.65% | 14 | 56.80% | False | chr11: 5,249,971- | chr11: 5,254,895- | HBG1/2 c. −114 to −121 |
| | | | | | 5,249,978 | 5,254,902 | |
| 168_-7_NA | 0.59% | 14 | 57.39% | False | chr11: 5,249,970- | chr11: 5,254,894- | HBG1/2 c. −113 to −119 |
| | | | | | 5,249,976 | 5,254,900 | |
| 165_-7_NA | 0.57% | 14 | 57.97% | False | chr11: 5,249,967- | chr11: 5,254,891- | HBG1/2 c. −110 to −116 |
| | | | | | 5,249,973 | 5,254,897 | |
| 169_-7_NA | 0.57% | 14 | 58.54% | False | chr11: 5,249,971- | chr11: 5,254,895- | HBG1/2 c. −114 to −120 |
| | | | | | 5,249,977 | 5,254,901 | |
| 157_-18_NA | 0.55% | 14 | 59.10% | False | chr11: 5,249,959- | chr11: 5,254,883- | HBG1/2 c. −102 to −119 |
| | | | | | 5,249,976 | 5,254,900 | |
| 168_-10_NA | 0.55% | 14 | 59.64% | False | chr11: 5,249,970- | chr11: 5,254,894- | HBG1/2 c. −113 to −122 |
| | | | | | 5,249,979 | 5,254,903 | |
| 169_-10_NA | 0.52% | 14 | 60.16% | False | chr11: 5,249,971- | chr11: 5,254,895- | HBG1/2 c. −114 to −123 |
| | | | | | 5,249,980 | 5,254,904 | |
| 168_-13_NA | 0.52% | 14 | 60.68% | False | chr11: 5,249,970- | chr11: 5,254,894- | HBG1/2 c. −113 to −125 |
| | | | | | 5,249,982 | 5,254,906 | |
| 168_-9_NA | 0.49% | 14 | 61.17% | False | chr11: 5,249,970- | chr11: 5,254,894- | HBG1/2 c. −113 to −121 |
| | | | | | 5,249,978 | 5,254,902 | |
| 162_-22_NA | 0.49% | 14 | 61.65% | True | chr11: 5,249,964- | chr11: 5,254,888- | HBG1/2 c. −107 to −128 |
| | | | | | 5,249,985 | 5,254,909 | |
| 166_-11_NA | 0.48% | 14 | 62.13% | False | chr11: 5,249,968- | chr11: 5,254,892- | HBG1/2 c. −111 to −121 |
| | | | | | 5,249,978 | 5,254,902 | |
| 169_-6_NA | 0.46% | 14 | 62.59% | True | chr11: 5,249,971- | chr11: 5,254,895- | HBG1/2 c. −114 to −119 |
| | | | | | 5,249,976 | 5,254,900 | |
| 168_-12_NA | 0.46% | 14 | 63.06% | False | chr11: 5,249,970- | chr11: 5,254,894- | HBG1/2 c. −113 to −124 |
| | | | | | 5,249,981 | 5,254,905 | |
| 166_-15_NA | 0.43% | 14 | 63.49% | False | chr11: 5,249,968- | chr11: 5,254,892- | HBG1/2 c. −111 to −125 |
| | | | | | 5,249,982 | 5,254,906 | |
| 167_-16_NA | 0.43% | 14 | 63.92% | False | chr11: 5,249,969- | chr11: 5,254,893- | HBG1/2 c. −112 to −127 |
| | | | | | 5,249,984 | 5,254,908 | |
| 166_-4_NA | 0.42% | 14 | 64.35% | False | chr11: 5,249,968- | chr11: 5,254,892- | HBG1/2 c. −111 to −114 |
| | | | | | 5,249,971 | 5,254,895 | |
| 167_-11_NA | 0.42% | 14 | 64.77% | False | chr11: 5,249,969- | chr11: 5,254,893- | HBG1/2 c. −112 to −122 |
| | | | | | 5,249,979 | 5,254,903 | |
| 162_-7_NA | 0.42% | 14 | 65.19% | True | chr11: 5,249,964- | chr11: 5,254,888- | HBG1/2 c. −107 to −113 |
| | | | | | 5,249,970 | 5,254,894 | |
| 170_-2_NA | 0.42% | 14 | 65.60% | False | chr11: 5,249,972- | chr11: 5,254,896- | HBG1/2 c. −115 to −116 |
| | | | | | 5,249,973 | 5,254,897 | |
| 168_-11_NA | 0.40% | 14 | 66.00% | False | chr11: 5,249,970- | chr11: 5,254,894- | HBG1/2 c. −113 to −123 |
| | | | | | 5,249,980 | 5,254,904 | |
| 167_-1_NA | 0.37% | 14 | 66.37% | False | chr11: 5,249,969- | chr11: 5,254,893- | HBG1/2 c. −112 to −112 |
| | | | | | 5,249,969 | 5,254,893 | |
| 166_-9_NA | 0.33% | 14 | 66.71% | False | chr11: 5,249,968- | chr11: 5,254,892- | HBG1/2 c. −111 to −119 |
| | | | | | 5,249,976 | 5,254,900 | |
| 167_-10_NA | 0.32% | 14 | 67.03% | False | chr11: 5,249,969- | chr11: 5,254,893- | HBG1/2 c. −112 to −121 |
| | | | | | 5,249,978 | 5,254,902 | |
| 166_-14_NA | 0.32% | 14 | 67.35% | False | chr11: 5,249,968- | chr11: 5,254,892- | HBG1/2 c. −111 to −124 |
| | | | | | 5,249,981 | 5,254,905 | |
| 167_-9_NA | 0.30% | 14 | 67.65% | False | chr11: 5,249,969- | chr11: 5,254,893- | HBG1/2 c. −112 to −120 |
| | | | | | 5,249,977 | 5,254,901 | |
| 168_-2_NA | 0.29% | 14 | 67.94% | False | chr11: 5,249,970- | chr11: 5,254,894- | HBG1/2 c. −113 to −114 |
| | | | | | 5,249,971 | 5,254,895 | |
| 169_-12_NA | 0.28% | 14 | 68.22% | False | chr11: 5,249,971- | chr11: 5,254,895- | HBG1/2 c. −114 to −125 |
| | | | | | 5,249,982 | 5,254,906 | |
| 169_-13_NA | 0.27% | 14 | 68.49% | False | chr11: 5,249,971- | chr11: 5,254,895- | HBG1/2 c. −114 to −126 |
| | | | | | 5,249,983 | 5,254,907 | |
| 169_-11_NA | 0.26% | 14 | 68.74% | True | chr11: 5,249,971- | chr11: 5,254,895- | HBG1/2 c. −114 to −124 |
| | | | | | 5,249,981 | 5,254,905 | |
| 165_-9_NA | 0.24% | 14 | 68.99% | False | chr11: 5,249,967- | chr11: 5,254,891- | HBG1/2 c. −110 to −118 |
| | | | | | 5,249,975 | 5,254,899 | |
| 167_-3_NA | 0.23% | 14 | 69.22% | False | chr11: 5,249,969- | chr11: 5,254,893- | HBG1/2 c. −112 to −114 |
| | | | | | 5,249,971 | 5,254,895 | |
| 163_-9_NA | 0.23% | 14 | 69.45% | False | chr11: 5,249,965- | chr11: 5,254,889- | HBG1/2 c. −108 to −116 |
| | | | | | 5,249,973 | 5,254,897 | |
| 167_-14_NA | 0.23% | 14 | 69.68% | False | chr11: 5,249,969- | chr11: 5,254,893- | HBG1/2 c. −112 to −125 |
| | | | | | 5,249,982 | 5,254,906 | |
| 152_-24_NA | 0.22% | 14 | 69.90% | True | chr11: 5,249,954- | chr11: 5,254,878- | HBG1/2 c. −97 to −120 |
| | | | | | 5,249,977 | 5,254,901 | |
| 157_-19_NA | 0.22% | 13 | 70.12% | False | chr11: 5,249,959- | chr11: 5,254,883- | HBG1/2 c. −102 to −120 |
| | | | | | 5,249,977 | 5,254,901 | |
| 163_-12_NA | 0.20% | 14 | 70.32% | False | chr11: 5,249,965- | chr11: 5,254,889- | HBG1/2 c. −108 to −119 |
| | | | | | 5,249,976 | 5,254,900 | |
| 166_-16_NA | 0.20% | 14 | 70.52% | False | chr11: 5,249,968- | chr11: 5,254,892- | HBG1/2 c. −111 to −126 |
| | | | | | 5,249,983 | 5,254,907 | |
| 162_-10_NA | 0.19% | 13 | 70.72% | False | chr11: 5,249,964- | chr11: 5,254,888- | HBG1/2 c. −107 to −116 |
| | | | | | 5,249,973 | 5,254,897 | |
| 158_-14_NA | 0.19% | 13 | 70.91% | False | chr11: 5,249,960- | chr11: 5,254,884- | HBG1/2 c. −103 to −116 |
| | | | | | 5,249,973 | 5,254,897 | |
| 159_-28_NA | 0.19% | 14 | 71.10% | True | chr11: 5,249,961- | chr11: 5,254,885- | HBG1/2 c. −104 to −131 |
| | | | | | 5,249,988 | 5,254,912 | |
| 162_-8_NA | 0.19% | 14 | 71.28% | False | chr11: 5,249,964- | chr11: 5,254,888- | HBG1/2 c. −107 to −114 |
| | | | | | 5,249,971 | 5,254,895 | |
| 165_-2_NA | 0.19% | 14 | 71.47% | False | chr11: 5,249,967- | chr11: 5,254,891- | HBG1/2 c. −110 to −111 |
| | | | | | 5,249,968 | 5,254,892 | |
| 152_-33_NA | 0.19% | 14 | 71.65% | True | chr11: 5,249,954- | chr11: 5,254,878- | HBG1/2 c. −97 to −129 |
| | | | | | 5,249,986 | 5,254,910 | |
| 168_-14_NA | 0.18% | 14 | 71.84% | False | chr11: 5,249,970- | chr11: 5,254,894- | HBG1/2 c. −113 to −126 |
| | | | | | 5,249,983 | 5,254,907 | |
| 161_-12_NA | 0.18% | 13 | 72.02% | False | chr11: 5,249,963- | chr11: 5,254,887- | HBG1/2 c. −106 to −117 |
| | | | | | 5,249,974 | 5,254,898 | |
| 170_-4_NA | 0.18% | 14 | 72.20% | False | chr11: 5,249,972- | chr11: 5,254,896- | HBG1/2 c. −115 to −118 |
| | | | | | 5,249,975 | 5,254,899 | |
| 162_-9_NA | 0.18% | 13 | 72.37% | False | chr11: 5,249,964- | chr11: 5,254,888- | HBG1/2 c. −107 to −115 |
| | | | | | 5,249,972 | 5,254,896 | |
| 164_-23_NA | 0.18% | 13 | 72.55% | False | chr11: 5,249,966- | chr11: 5,254,890- | HBG1/2 c. −109 to −131 |
| | | | | | 5,249,988 | 5,254,912 | |
| 164_-10_NA | 0.18% | 14 | 72.73% | False | chr11: 5,249,966- | chr11: 5,254,890- | HBG1/2 c. −109 to −118 |
| | | | | | 5,249,975 | 5,254,899 | |
| 166_-27_NA | 0.17% | 14 | 72.90% | True | chr11: 5,249,968- | chr11: 5,254,892- | HBG1/2 c. −111 to −137 |
| | | | | | 5,249,994 | 5,254,918 | |
| 160_-12_NA | 0.16% | 14 | 73.06% | False | chr11: 5,249,962- | chr11: 5,254,886- | HBG1/2 c. −105 to −116 |
| | | | | | 5,249,973 | 5,254,897 | |
| 165_-12_NA | 0.16% | 14 | 73.22% | False | chr11: 5,249,967- | chr11: 5,254,891- | HBG1/2 c. −110 to −121 |
| | | | | | 5,249,978 | 5,254,902 | |
| 170_-5_NA | 0.16% | 14 | 73.38% | False | chr11: 5,249,972- | chr11: 5,254,896- | HBG1/2 c. −115 to −119 |
| | | | | | 5,249,976 | 5,254,900 | |
| 165_-11_NA | 0.16% | 14 | 73.54% | False | chr11: 5,249,967- | chr11: 5,254,891- | HBG1/2 c. −110 to −120 |
| | | | | | 5,249,977 | 5,254,901 | |
| 137_-27_NA | 0.15% | 14 | 73.69% | True | chr11: 5,249,939- | chr11: 5,254,863- | HBG1/2 c. −82 to −108 |
| | | | | | 5,249,965 | 5,254,889 | |
| 165_-3_NA | 0.15% | 14 | 73.84% | False | chr11: 5,249,967- | chr11: 5,254,891- | HBG1/2 c. −110 to −112 |
| | | | | | 5,249,969 | 5,254,893 | |
| 169_-14_NA | 0.15% | 14 | 73.99% | False | chr11: 5,249,971- | chr11: 5,254,895- | HBG1/2 c. −114 to −127 |
| | | | | | 5,249,984 | 5,254,908 | |
| 172_-5_NA | 0.15% | 14 | 74.14% | True | chr11: 5,249,974- | chr11: 5,254,898- | HBG1/2 c. −117 to −121 |
| | | | | | 5,249,978 | 5,254,902 | |
| 164_-9_NA | 0.15% | 14 | 74.29% | False | chr11: 5,249,966- | chr11: 5,254,890- | HBG1/2 c. −109 to −117 |
| | | | | | 5,249,974 | 5,254,898 | |
| 152_-29_NA | 0.14% | 13 | 74.44% | True | chr11: 5,249,954- | chr11: 5,254,878- | HBG1/2 c. −97 to −125 |
| | | | | | 5,249,982 | 5,254,906 | |
| 166_-22_NA | 0.14% | 14 | 74.58% | False | chr11: 5,249,968- | chr11: 5,254,892- | HBG1/2 c. −111 to −132 |
| | | | | | 5,249,989 | 5,254,913 | |
| 169_-1_NA | 0.14% | 14 | 74.72% | False | chr11: 5,249,971- | chr11: 5,254,895- | HBG1/2 c. −114 to −114 |
| | | | | | 5,249,971 | 5,254,895 | |
| 161_-17_NA | 0.13% | 14 | 74.85% | False | chr11: 5,249,963- | chr11: 5,254,887- | HBG1/2 c. −106 to −122 |
| | | | | | 5,249,979 | 5,254,903 | |
| 162_-14_NA | 0.13% | 14 | 74.98% | False | chr11: 5,249,964- | chr11: 5,254,888- | HBG1/2 c. −107 to −120 |
| | | | | | 5,249,977 | 5,254,901 | |
| 153_-19_NA | 0.13% | 14 | 75.11% | False | chr11: 5,249,955- | chr11: 5,254,879- | HBG1/2 c. −98 to −116 |
| | | | | | 5,249,973 | 5,254,897 | |
| 151_-20_NA | 0.13% | 14 | 75.23% | False | chr11: 5,249,953- | chr11: 5,254,877- | HBG1/2 c. −96 to −115 |
| | | | | | 5,249,972 | 5,254,896 | |
| 161_-11_NA | 0.13% | 13 | 75.36% | False | chr11: 5,249,963- | chr11: 5,254,887- | HBG1/2 c. −106 to −116 |
| | | | | | 5,249,973 | 5,254,897 | |
| 165_-5_NA | 0.13% | 14 | 75.49% | False | chr11: 5,249,967- | chr11: 5,254,891- | HBG1/2 c. −110 to −114 |
| | | | | | 5,249,971 | 5,254,895 | |
| 156_-15_NA | 0.12% | 14 | 75.61% | False | chr11: 5,249,958- | chr11: 5,254,882- | HBG1/2 c. −101 to −115 |
| | | | | | 5,249,972 | 5,254,896 | |
| 167_-2_NA | 0.12% | 14 | 75.73% | False | chr11: 5,249,969- | chr11: 5,254,893- | HBG1/2 c. −112 to −113 |
| | | | | | 5,249,970 | 5,254,894 | |
| 167_-18_NA | 0.12% | 14 | 75.86% | False | chr11: 5,249,969- | chr11: 5,254,893- | HBG1/2 c. −112 to −129 |
| | | | | | 5,249,986 | 5,254,910 | |
| 145_-32_NA | 0.12% | 13 | 75.98% | True | chr11: 5,249,947- | chr11: 5,254,871- | HBG1/2 c. −90 to −121 |
| | | | | | 5,249,978 | 5,254,902 | |
| 166_-21_NA | 0.12% | 14 | 76.10% | False | chr11: 5,249,968- | chr11: 5,254,892- | HBG1/2 c. −111 to −131 |
| | | | | | 5,249,988 | 5,254,912 | |
| 169_-18_NA | 0.12% | 14 | 76.22% | False | chr11: 5,249,971- | chr11: 5,254,895- | HBG1/2 c. −114 to −131 |
| | | | | | 5,249,988 | 5,254,912 | |
| 153_-38_NA | 0.12% | 13 | 76.34% | True | chr11: 5,249,955- | chr11: 5,254,879- | HBG1/2 c. −98 to −135 |
| | | | | | 5,249,992 | 5,254,916 | |
| 163_-17_NA | 0.12% | 14 | 76.46% | False | chr11: 5,249,965- | chr11: 5,254,889- | HBG1/2 c. −108 to −124 |
| | | | | | 5,249,981 | 5,254,905 | |
| 165_-14_NA | 0.12% | 14 | 76.58% | False | chr11: 5,249,967- | chr11: 5,254,891- | HBG1/2 c. −110 to −123 |
| | | | | | 5,249,980 | 5,254,904 | |
| 165_-15_NA | 0.12% | 14 | 76.70% | False | chr11: 5,249,967- | chr11: 5,254,891- | HBG1/2 c. −110 to −124 |
| | | | | | 5,249,981 | 5,254,905 | |
| 160_-14_NA | 0.12% | 13 | 76.81% | False | chr11: 5,249,962- | chr11: 5,254,886- | HBG1/2 c. −105 to −118 |
| | | | | | 5,249,975 | 5,254,899 | |
| 166_-25_NA | 0.11% | 13 | 76.93% | False | chr11: 5,249,968- | chr11: 5,254,892- | HBG1/2 c. −111 to −135 |
| | | | | | 5,249,992 | 5,254,916 | |
| 170_-9_NA | 0.11% | 14 | 77.04% | False | chr11: 5,249,972- | chr11: 5,254,896- | HBG1/2 c. −115 to −123 |
| | | | | | 5,249,980 | 5,254,904 | |
| 152_-18_NA | 0.11% | 14 | 77.15% | False | chr11: 5,249,954- | chr11: 5,254,878- | HBG1/2 c. −97 to −114 |
| | | | | | 5,249,971 | 5,254,895 | |
| 168_-18_NA | 0.11% | 14 | 77.26% | False | chr11: 5,249,970- | chr11: 5,254,894- | HBG1/2 c. −113 to −130 |
| | | | | | 5,249,987 | 5,254,911 | |
| 163_-10_NA | 0.11% | 14 | 77.38% | False | chr11: 5,249,965- | chr11: 5,254,889- | HBG1/2 c. −108 to −117 |
| | | | | | 5,249,974 | 5,254,898 | |
| 160_-11_NA | 0.11% | 14 | 77.49% | False | chr11: 5,249,962- | chr11: 5,254,886- | HBG1/2 c. −105 to −115 |
| | | | | | 5,249,972 | 5,254,896 | |
| 150_-21_NA | 0.11% | 13 | 77.59% | False | chr11: 5,249,952- | chr11: 5,254,876- | HBG1/2 c. −95 to −115 |
| | | | | | 5,249,972 | 5,254,896 | |
| 157_-23_NA | 0.11% | 13 | 77.70% | False | chr11: 5,249,959- | chr11: 5,254,883- | HBG1/2 c. −102 to −124 |
| | | | | | 5,249,981 | 5,254,905 | |
| 155_-16_NA | 0.11% | 12 | 77.81% | False | chr11: 5,249,957- | chr11: 5,254,881- | HBG1/2 c. −100 to −115 |
| | | | | | 5,249,972 | 5,254,896 | |
| 167_-17_NA | 0.11% | 12 | 77.92% | False | chr11: 5,249,969- | chr11: 5,254,893- | HBG1/2 c. −112 to −128 |
| | | | | | 5,249,985 | 5,254,909 | |
| 164_-28_NA | 0.11% | 13 | 78.02% | False | chr11: 5,249,966- | chr11: 5,254,890- | HBG1/2 c. −109 to −136 |
| | | | | | 5,249,993 | 5,254,917 | |
| 164_-27_NA | 0.10% | 14 | 78.12% | False | chr11: 5,249,966- | chr11: 5,254,890- | HBG1/2 c. −109 to −135 |
| | | | | | 5,249,992 | 5,254,916 | |
| 156_-38_NA | 0.10% | 13 | 78.22% | True | chr11: 5,249,958- | chr11: 5,254,882- | HBG1/2 c. −101 to −138 |
| | | | | | 5,249,995 | 5,254,919 | |
| 154_-18_NA | 0.10% | 12 | 78.32% | False | chr11: 5,249,956- | chr11: 5,254,880- | HBG1/2 c. −99 to −116 |
| | | | | | 5,249,973 | 5,254,897 | |
| 156_-27_NA | 0.10% | 13 | 78.42% | True | chr11: 5,249,958- | chr11: 5,254,882- | HBG1/2 c. −101 to −127 |
| | | | | | 5,249,984 | 5,254,908 | |
| 157_-24_NA | 0.10% | 11 | 78.52% | False | chr11: 5,249,959- | chr11: 5,254,883- | HBG1/2 c. −102 to −125 |
| | | | | | 5,249,982 | 5,254,906 | |
| 168_-19_NA | 0.10% | 14 | 78.62% | False | chr11: 5,249,970- | chr11: 5,254,894- | HBG1/2 c. −113 to −131 |
| | | | | | 5,249,988 | 5,254,912 | |
| 165_-10_NA | 0.10% | 14 | 78.72% | False | chr11: 5,249,967- | chr11: 5,254,891- | HBG1/2 c. −110 to −119 |
| | | | | | 5,249,976 | 5,254,900 | |
| 171_-1_NA | 0.10% | 14 | 78.82% | False | chr11: 5,249,973- | chr11: 5,254,897- | HBG1/2 c. −116 to −116 |
| | | | | | 5,249,973 | 5,254,897 | |
| 165_-16_NA | 0.10% | 13 | 78.92% | False | chr11: 5,249,967- | chr11: 5,254,891- | HBG1/2 c. −110 to −125 |
| | | | | | 5,249,982 | 5,254,906 | |
| 164_-14_NA | 0.10% | 12 | 79.02% | False | chr11: 5,249,966- | chr11: 5,254,890- | HBG1/2 c. −109 to −122 |
| | | | | | 5,249,979 | 5,254,903 | |
| 167_-4_NA; | 0.10% | 14 | 79.11% | False | chr11: 5,249,969- | chr11: 5,254,893- | HBG1/2 c. −112 to −115; |
| 175_-1_NA | | | | | 5,249,972; | 5,254,896; | HBG1/2 c. −120 to −120 |
| | | | | | chr11: 5,249,977- | chr11: 5,254,901- | |
| | | | | | 5,249,977 | 5,254,901 | |
| 160_-19_NA | 0.10% | 14 | 79.21% | False | chr11: 5,249,962- | chr11: 5,254,886- | HBG1/2 c. −105 to −123 |
| | | | | | 5,249,980 | 5,254,904 | |
| 166_-17_NA | 0.10% | 13 | 79.30% | False | chr11: 5,249,968- | chr11: 5,254,892- | HBG1/2 c. −111 to −127 |
| | | | | | 5,249,984 | 5,254,908 | |
| 168_-15_NA | 0.10% | 14 | 79.40% | True | chr11: 5,249,970- | chr11: 5,254,894- | HBG1/2 c. −113 to −127 |
| | | | | | 5,249,984 | 5,254,908 | |
| 162_-33_NA | 0.09% | 12 | 79.49% | True | chr11: 5,249,964- | chr11: 5,254,888- | HBG1/2 c. −107 to −139 |
| | | | | | 5,249,996 | 5,254,920 | |
| 168_-25_NA | 0.09% | 13 | 79.58% | False | chr11: 5,249,970- | chr11: 5,254,894- | HBG1/2 c. −113 to −137 |
| | | | | | 5,249,994 | 5,254,918 | |
| 166_-20_NA | 0.09% | 10 | 79.67% | False | chr11: 5,249,968- | chr11: 5,254,892- | HBG1/2 c. −111 to −130 |
| | | | | | 5,249,987 | 5,254,911 | |
| 170_-3_NA | 0.09% | 13 | 79.76% | False | chr11: 5,249,972- | chr11: 5,254,896- | HBG1/2 c. −115 to −117 |
| | | | | | 5,249,974 | 5,254,898 | |
| 157_-28_NA | 0.09% | 11 | 79.84% | False | chr11: 5,249,959- | chr11: 5,254,883- | HBG1/2 c. −102 to −129 |
| | | | | | 5,249,986 | 5,254,910 | |
| 166_-26_NA | 0.09% | 13 | 79.93% | False | chr11: 5,249,968- | chr11: 5,254,892- | HBG1/2 c. −111 to −136 |
| | | | | | 5,249,993 | 5,254,917 | |
| 160_-259_NA | 0.08% | 9 | 80.01% | True | chr11: 5,249,962- | chr11: 5,254,886- | HBG1/2 c. −105 to −363 |
| | | | | | 5,250,220 | 5,255,144 | |
| 160_-16_NA | 0.08% | 12 | 80.09% | False | chr11: 5,249,962- | chr11: 5,254,886- | HBG1/2 c. −105 to −120 |
| | | | | | 5,249,977 | 5,254,901 | |
| 159_-23_NA | 0.08% | 13 | 80.17% | False | chr11: 5,249,961- | chr11: 5,254,885- | HBG1/2 c. −104 to −126 |
| | | | | | 5,249,983 | 5,254,907 | |
| 167_-25_NA | 0.08% | 13 | 80.25% | False | chr11: 5,249,969- | chr11: 5,254,893- | HBG1/2 c. −112 to −136 |
| | | | | | 5,249,993 | 5,254,917 | |
| 165_-6_NA; | 0.08% | 14 | 80.33% | False | chr11: 5,249,967- | chr11: 5,254,891- | HBG1/2 c. −110 to −115; |
| 175_-1_NA | | | | | 5,249,972; | 5,254,896; | HBG1/2 c. −120 to −120 |
| | | | | | chr11: 5,249,977- | chr11: 5,254,901- | |
| | | | | | 5,249,977 | 5,254,901 | |
| 157_-14_NA | 0.08% | 13 | 80.41% | False | chr11: 5,249,959- | chr11: 5,254,883- | HBG1/2 c. −102 to −115 |
| | | | | | 5,249,972 | 5,254,896 | |
| 154_-28_NA | 0.08% | 13 | 80.49% | True | chr11: 5,249,956- | chr11: 5,254,880- | HBG1/2 c. −99 to −126 |
| | | | | | 5,249,983 | 5,254,907 | |
| 168_-23_NA | 0.08% | 12 | 80.56% | False | chr11: 5,249,970- | chr11: 5,254,894- | HBG1/2 c. −113 to −135 |
| | | | | | 5,249,992 | 5,254,916 | |
| 169_-23_NA | 0.08% | 14 | 80.64% | False | chr11: 5,249,971- | chr11: 5,254,895- | HBG1/2 c. −114 to −136 |
| | | | | | 5,249,993 | 5,254,917 | |
| 167_-4_NA; | 0.07% | 12 | 80.71% | False | chr11: 5,249,969- | chr11: 5,254,893- | HBG1/2 c. −112 to −115; |
| 174_-2_NA | | | | | 5,249,972; | 5,254,896; | HBG1/2 c. −119 to −120 |
| | | | | | chr11: 5,249,976- | chr11: 5,254,900- | |
| | | | | | 5,249,977 | 5,254,901 | |
| 167_-36_NA | 0.07% | 11 | 80.79% | True | chr11: 5,249,969- | chr11: 5,254,893- | HBG1/2 c. −112 to −147 |
| | | | | | 5,250,004 | 5,254,928 | |
| 165_-29_NA | 0.07% | 12 | 80.86% | False | chr11: 5,249,967- | chr: 5,254,891- | HBG1/2 c. −110 to −138 |
| | | | | | 5,249,995 | 5,254,919 | |
| 163_-6_NA | 0.07% | 13 | 80.93% | False | chr11: 5,249,965- | chr11: 5,254,889- | HBG1/2 c. −108 to −113 |
| | | | | | 5,249,970 | 5,254,894 | |
| 159_-33_NA | 0.07% | 13 | 81.01% | True | chr11: 5,249,961- | chr11: 5,254,885- | HBG1/2 c. −104 to −136 |
| | | | | | 5,249,993 | 5,254,917 | |
| 162_-11_NA | 0.07% | 13 | 81.08% | False | chr11: 5,249,964- | chr11: 5,254,888- | HBG1/2 c. −107 to −117 |
| | | | | | 5,249,974 | 5,254,898 | |
| 167_-20_NA | 0.07% | 10 | 81.15% | False | chr11: 5,249,969- | chr11: 5,254,893- | HBG1/2 c. −112 to −131 |
| | | | | | 5,249,988 | 5,254,912 | |
| 169_-24_NA | 0.07% | 13 | 81.21% | False | chr11: 5,249,971- | chr11: 5,254,895- | HBG1/2 c. −114 to −137 |
| | | | | | 5,249,994 | 5,254,918 | |
| 167_-24_NA | 0.07% | 11 | 81.28% | False | chr11: 5,249,969- | chr11: 5,254,893- | HBG1/2 c. −112 to −135 |
| | | | | | 5,249,992 | 5,254,916 | |
| 164_-15_NA | 0.07% | 13 | 81.35% | False | chr11: 5,249,966- | chr11: 5,254,890- | HBG1/2 c. −109 to −123 |
| | | | | | 5,249,980 | 5,254,904 | |
| 166_-19_NA | 0.07% | 12 | 81.42% | False | chr11: 5,249,968- | chr11: 5,254,892- | HBG1/2 c. −111 to −129 |
| | | | | | 5,249,986 | 5,254,910 | |
| 166_-1_NA | 0.07% | 13 | 81.49% | False | chr11: 5,249,968- | chr11: 5,254,892- | HBG1/2 c. −111 to −111 |
| | | | | | 5,249,968 | 5,254,892 | |
| 169_-17_NA | 0.07% | 12 | 81.55% | False | chr11: 5,249,971- | chr11: 5,254,895- | HBG1/2 c. −114 to −130 |
| | | | | | 5,249,987 | 5,254,911 | |
| 154_-17_NA | 0.07% | 11 | 81.62% | False | chr11: 5,249,956- | chr11: 5,254,880- | HBG1/2 c. −99 to −115 |
| | | | | | 5,249,972 | 5,254,896 | |
| 164_-11_NA | 0.07% | 12 | 81.68% | False | chr11: 5,249,966- | chr11: 5,254,890- | HBG1/2 c. −109 to −119 |
| | | | | | 5,249,976 | 5,254,900 | |
| 166_-5_NA; | 0.07% | 12 | 81.75% | False | chr11: 5,249,968- | chr11: 5,254,892- | HBG1/2 c. −111 to −115; |
| 175_-1_NA | | | | | 5,249,972; | 5,254,896; | HBG1/2 c. −120 to −120 |
| | | | | | chr11: 5,249,977- | chr11: 5,254,901- | |
| | | | | | 5,249,977 | 5,254,901 | |
| 170_-10_NA | 0.07% | 14 | 81.81% | False | chr11: 5,249,972- | chr11: 5,254,896- | HBG1/2 c. −115 to −124 |
| | | | | | 5,249,981 | 5,254,905 | |
| 152_-19_NA | 0.06% | 11 | 81.88% | False | chr11: 5,249,954- | chr11: 5,254,878- | HBG1/2 c. −97 to −115 |
| | | | | | 5,249,972 | 5,254,896 | |
| 166_-23_NA | 0.06% | 12 | 81.94% | False | chr11: 5,249,968- | chr11: 5,254,892- | HBG1/2 c. −111 to −133 |
| | | | | | 5,249,990 | 5,254,914 | |
| 162_-19_NA | 0.06% | 14 | 82.01% | False | chr11: 5,249,964- | chr11: 5,254,888- | HBG1/2 c. −107 to −125 |
| | | | | | 5,249,982 | 5,254,906 | |
| 167_-38_NA | 0.06% | 12 | 82.07% | False | chr11: 5,249,969- | chr11: 5,254,893- | HBG1/2 c. −112 to −149 |
| | | | | | 5,250,006 | 5,254,930 | |
| 161_-10_NA | 0.06% | 13 | 82.14% | False | chr11: 5,249,963- | chr11: 5,254,887- | HBG1/2 c. −106 to −115 |
| | | | | | 5,249,972 | 5,254,896 | |
| 158_-15_NA | 0.06% | 12 | 82.20% | False | chr11: 5,249,960- | chr11: 5,254,884- | HBG1/2 c. −103 to −117 |
| | | | | | 5,249,974 | 5,254,898 | |
| 163_-11_NA | 0.06% | 12 | 82.26% | False | chr11: 5,249,965- | chr11: 5,254,889- | HBG1/2 c. −108 to −118 |
| | | | | | 5,249,975 | 5,254,899 | |
| 168_-17_NA | 0.06% | 11 | 82.33% | False | chr11: 5,249,970- | chr11: 5,254,894- | HBG1/2 c. −113 to −129 |
| | | | | | 5,249,986 | 5,254,910 | |
| 151_-43_NA | 0.06% | 12 | 82.39% | True | chr11: 5,249,953- | chr11: 5,254,877- | HBG1/2 c. −96 to −138 |
| | | | | | 5,249,995 | 5,254,919 | |
| 158_-16_NA | 0.06% | 12 | 82.45% | False | chr11: 5,249,960- | chr11: 5,254,884- | HBG1/2 c. −103 to −118 |
| | | | | | 5,249,975 | 5,254,899 | |
| 169_-19_NA | 0.06% | 13 | 82.51% | False | chr11: 5,249,971- | chr11: 5,254,895- | HBG1/2 c. −114 to −132 |
| | | | | | 5,249,989 | 5,254,913 | |
| 170_-17_NA | 0.06% | 12 | 82.57% | False | chr11: 5,249,972- | chr11: 5,254,896- | HBG1/2 c. −115 to −131 |
| | | | | | 5,249,988 | 5,254,912 | |
| 158_-21_NA | 0.06% | 12 | 82.63% | False | chr11: 5,249,960- | chr11: 5,254,884- | HBG1/2 c. −103 to −123 |
| | | | | | 5,249,980 | 5,254,904 | |
| 152_-28_NA | 0.06% | 13 | 82.69% | False | chr11: 5,249,954- | chr11: 5,254,878- | HBG1/2 c. −97 to −124 |
| | | | | | 5,249,981 | 5,254,905 | |
| 150_-33_NA | 0.06% | 13 | 82.74% | False | chr11: 5,249,952- | chr11: 5,254,876- | HBG1/2 c. −95 to −127 |
| | | | | | 5,249,984 | 5,254,908 | |
| 170_-13_NA | 0.05% | 13 | 82.80% | False | chr11: 5,249,972- | chr11: 5,254,896- | HBG1/2 c. −115 to −127 |
| | | | | | 5,249,984 | 5,254,908 | |
| 165_-19_NA | 0.05% | 13 | 82.85% | False | chr11: 5,249,967- | chr11: 5,254,891- | HBG1/2 c. −110 to −128 |
| | | | | | 5,249,985 | 5,254,909 | |
| 158_-17_NA | 0.05% | 11 | 82.91% | False | chr11: 5,249,960- | chr11: 5,254,884- | HBG1/2 c. −103 to −119 |
| | | | | | 5,249,976 | 5,254,900 | |
| 159_-11_NA | 0.05% | 7 | 82.96% | False | chr11: 5,249,961- | chr11: 5,254,885- | HBG1/2 c. −104 to −114 |
| | | | | | 5,249,971 | 5,254,895 | |
| 158_-20_NA | 0.05% | 12 | 83.01% | False | chr11: 5,249,960- | chr11: 5,254,884- | HBG1/2 c. −103 to −122 |
| | | | | | 5,249,979 | 5,254,903 | |
| 155_-12_NA | 0.05% | 10 | 83.07% | True | chr11: 5,249,957- | chr11: 5,254,881- | HBG1/2 c. −100 to −111 |
| | | | | | 5,249,968 | 5,254,892 | |
| 168_-3_NA; | 0.05% | 12 | 83.12% | False | chr11: 5,249,970- | chr11: 5,254,894- | HBG1/2 c. −113 to −115; |
| 175_-1_NA | | | | | 5,249,972; | 5,254,896; | HBG1/2 c. −120 to −120 |
| | | | | | chr11: 5,249,977- | chr11: 5,254,901- | |
| | | | | | 5,249,977 | 5,254,901 | |
| 169_-16_NA | 0.05% | 14 | 83.17% | False | chr11: 5,249,971- | chr11: 5,254,895- | HBG1/2 c. −114 to −129 |
| | | | | | 5,249,986 | 5,254,910 | |
| 157_-40_NA | 0.05% | 13 | 83.22% | True | chr11: 5,249,959- | chr11: 5,254,883- | HBG1/2 c. −102 to −141 |
| | | | | | 5,249,998 | 5,254,922 | |
| 168_-24_NA | 0.05% | 11 | 83.27% | False | chr11: 5,249,970- | chr11: 5,254,894- | HBG1/2 c. −113 to −136 |
| | | | | | 5,249,993 | 5,254,917 | |
| 165_-6_NA; | 0.05% | 12 | 83.33% | False | chr11: 5,249,967- | chr11: 5,254,891- | HBG1/2 c. −110 to −115; |
| 174_-2_NA | | | | | 5,249,972; | 5,254,896; | HBG1/2 c. −119 to −120 |
| | | | | | chr11: 5,249,976- | chr11: 5,254,900- | |
| | | | | | 5,249,977 | 5,254,901 | |
| 158_-36_NA | 0.05% | 11 | 83.38% | False | chr11: 5,249,960- | chr11: 5,254,884- | HBG1/2 c. −103 to −138 |
| | | | | | 5,249,995 | 5,254,919 | |
| 169_-22_NA | 0.05% | 12 | 83.43% | False | chr11: 5,249,971- | chr11: 5,254,895- | HBG1/2 c. −114 to −135 |
| | | | | | 5,249,992 | 5,254,916 | |
| 157_-16_NA | 0.05% | 14 | 83.48% | False | chr11: 5,249,959- | chr11: 5,254,883- | HBG1/2 c. −102 to −117 |
| | | | | | 5,249,974 | 5,254,898 | |
| 165_-291_NA | 0.05% | 7 | 83.53% | True | chr11: 5,249,967- | chr11: 5,254,891- | HBG1/2 c. −110 to −400 |
| | | | | | 5,250,257 | 5,255,181 | |
| 173_-1_NA | 0.05% | 12 | 83.58% | False | chr11: 5,249,975- | chr11: 5,254,899- | HBG1/2 c. −118 to −118 |
| | | | | | 5,249,975 | 5,254,899 | |
| 167_-26_NA | 0.05% | 11 | 83.63% | False | chr11: 5,249,969- | chr11: 5,254,893- | HBG1/2 c. −112 to −137 |
| | | | | | 5,249,994 | 5,254,918 | |
| 148_-22_NA | 0.05% | 10 | 83.68% | True | chr11: 5,249,950- | chr11: 5,254,874- | HBG1/2 c. −93 to −114 |
| | | | | | 5,249,971 | 5,254,895 | |
| 152_-23_NA | 0.05% | 10 | 83.72% | False | chr11: 5,249,954- | chr11: 5,254,878- | HBG1/2 c. −97 to −119 |
| | | | | | 5,249,976 | 5,254,900 | |
| 165_-4_NA | 0.05% | 11 | 83.77% | False | chr11: 5,249,967- | chr11: 5,254,891- | HBG1/2 c. −110 to −113 |
| | | | | | 5,249,970 | 5,254,894 | |
| 165_-17_NA | 0.05% | 12 | 83.82% | False | chr11: 5,249,967- | chr11: 5,254,891- | HBG1/2 c. −110 to −126 |
| | | | | | 5,249,983 | 5,254,907 | |
| 165_-298_NA | 0.05% | 6 | 83.87% | False | chr11: 5,249,967- | chr11: 5,254,891- | HBG1/2 c. −110 to −407 |
| | | | | | 5,250,264 | 5,255,188 | |
| 154_-23_NA | 0.05% | 11 | 83.92% | False | chr11: 5,249,956- | chr11: 5,254,880- | HBG1/2 c. −99 to −121 |
| | | | | | 5,249,978 | 5,254,902 | |
| 168_-3_NA; | 0.05% | 11 | 83.96% | False | chr11: 5,249,970- | chr11: 5,254,894- | HBG1/2 c. −113 to −115; |
| 174_-2_NA | | | | | 5,249,972; | 5,254,896; | HBG1/2 c. −119 to −120 |
| | | | | | chr11: 5,249,976- | chr11: 5,254,900- | |
| | | | | | 5,249,977 | 5,254,901 | |
| 165_-5_NA; | 0.05% | 1 | 84.01% | False | chr11: 5,249,967- | chr11: 5,254,891- | HBG1/2 c. −110 to −114; |
| 174_-12_NA | | | | | 5,249,971; | 5,254,895; | HBG1/2 c. −119 to −130 |
| | | | | | chr11: 5,249,976- | chr11: 5,254,900- | |
| | | | | | 5,249,987 | 5,254,911 | |
| 165_-271_NA | 0.05% | 6 | 84.06% | True | chr11: 5,249,967- | chr11: 5,254,891- | HBG1/2 c. −110 to −380 |
| | | | | | 5,250,237 | 5,255,161 | |
| 164_-4_NA; | 0.05% | 4 | 84.11% | False | chr11: 5,249,966- | chr11: 5,254,890- | HBG1/2 c. −109 to −112; |
| 174_-2_NA | | | | | 5,249,969; | 5,254,893; | HBG1/2 c. −119 to −120 |
| | | | | | chr11: 5,249,976- | chr11: 5,254,900- | |
| | | | | | 5,249,977 | 5,254,901 | |
| 160_-8_NA; | 0.05% | 7 | 84.15% | False | chr11: 5,249,962- | chr11: 5,254,886- | HBG1/2 c. −105 to −112; |
| 170_-251_NA | | | | | 5,249,969; | 5,254,893; | HBG1/2 c. −115 to −365 |
| | | | | | chr11: 5,249,972- | chr11: 5,254,896- | |
| | | | | | 5,250,222 | 5,255,146 | |
| 167_-31_NA | 0.05% | 11 | 84.20% | False | chr11: 5,249,969- | chr11: 5,254,893- | HBG1/2 c. −112 to −142 |
| | | | | | 5,249,999 | 5,254,923 | |
| 159_-24_NA | 0.05% | 9 | 84.24% | False | chr11: 5,249,961- | chr11: 5,254,885- | HBG1/2 c. −104 to −127 |
| | | | | | 5,249,984 | 5,254,908 | |
| 151_-32_NA | 0.05% | 11 | 84.29% | True | chr11: 5,249,953- | chr11: 5,254,877- | HBG1/2 c. −96 to −127 |
| | | | | | 5,249,984 | 5,254,908 | |
| 170_-8_NA | 0.04% | 13 | 84.34% | False | chr11: 5,249,972- | chr11: 5,254,896- | HBG1/2 c. −115 to −122 |
| | | | | | 5,249,979 | 5,254,903 | |
| 151_-29_NA | 0.04% | 12 | 84.38% | False | chr11: 5,249,953- | chr11: 5,254,877- | HBG1/2 c. −96 to −124 |
| | | | | | 5,249,981 | 5,254,905 | |
| 151_-22_NA | 0.04% | 12 | 84.42% | False | chr11: 5,249,953- | chr11: 5,254,877- | HBG1/2 c. −96 to −117 |
| | | | | | 5,249,974 | 5,254,898 | |
| 153_-21_NA | 0.04% | 11 | 84.47% | False | chr11: 5,249,955- | chr11: 5,254,879- | HBG1/2 c. −98 to −118 |
| | | | | | 5,249,975 | 5,254,899 | |
| 167_-19_NA | 0.04% | 10 | 84.51% | False | chr11: 5,249,969- | chr11: 5,254,893- | HBG1/2 c. −112 to −130 |
| | | | | | 5,249,987 | 5,254,911 | |
| 168_-22_NA | 0.04% | 13 | 84.56% | False | chr11: 5,249,970- | chr11: 5,254,894- | HBG1/2 c. −113 to −134 |
| | | | | | 5,249,991 | 5,254,915 | |
| 164_-26_NA | 0.04% | 10 | 84.60% | False | chr11: 5,249,966- | chr11: 5,254,890- | HBG1/2 c. −109 to −134 |
| | | | | | 5,249,991 | 5,254,915 | |
| 153_-34_NA | 0.04% | 14 | 84.64% | False | chr11: 5,249,955- | chr11: 5,254,879- | HBG1/2 c. −98 to −131 |
| | | | | | 5,249,988 | 5,254,912 | |
| 162_-15_NA | 0.04% | 11 | 84.68% | False | chr11: 5,249,964- | chr11: 5,254,888- | HBG1/2 c. −107 to −121 |
| | | | | | 5,249,978 | 5,254,902 | |
| 159_-27_NA | 0.04% | 11 | 84.72% | False | chr11: 5,249,961- | chr11: 5,254,885- | HBG1/2 c. −104 to −130 |
| | | | | | 5,249,987 | 5,254,911 | |
| 153_-37_NA | 0.04% | 9 | 84.76% | True | chr11: 5,249,955- | chr11: 5,254,879- | HBG1/2 c. −98 to −134 |
| | | | | | 5,249,991 | 5,254,915 | |
| 175_-1_NA | 0.04% | 12 | 84.80% | False | chr11: 5,249,977- | chr11: 5,254,901- | HBG1/2 c. −120 to −120 |
| | | | | | 5,249,977 | 5,254,901 | |
| 160_-10_NA | 0.04% | 11 | 84.84% | False | chr11: 5,249,962- | chr11: 5,254,886- | HBG1/2 c. −105 to −114 |
| | | | | | 5,249,971 | 5,254,895 | |
| 155_-19_NA | 0.04% | 11 | 84.88% | False | chr11: 5,249,957- | chr11: 5,254,881- | HBG1/2 c. −100 to −118 |
| | | | | | 5,249,975 | 5,254,899 | |
| 164_-5_NA | 0.04% | 9 | 84.92% | False | chr11: 5,249,966- | chr11: 5,254,890- | HBG1/2 c. −109 to −113 |
| | | | | | 5,249,970 | 5,254,894 | |
| 163_-15_NA | 0.04% | 12 | 84.96% | False | chr11: 5,249,965- | chr11: 5,254,889- | HBG1/2 c. −108 to −122 |
| | | | | | 5,249,979 | 5,254,903 | |
| 161_-22_NA | 0.04% | 9 | 85.00% | False | chr11: 5,249,963- | chr11: 5,254,887- | HBG1/2 c. −106 to −127 |
| | | | | | 5,249,984 | 5,254,908 | |
| 155_-17_NA | 0.04% | 12 | 85.04% | False | chr11: 5,249,957- | chr11: 5,254,881- | HBG1/2 c. −100 to −116 |
| | | | | | 5,249,973 | 5,254,897 | |
| 165_-6_NA; | 0.04% | 11 | 85.07% | False | chr11: 5,249,967- | chr11: 5,254,891- | HBG1/2 c. −110 to −115; |
| 176_-2_NA | | | | | 5,249,972; | 5,254,896; | HBG1/2 c. −121 to −122 |
| | | | | | chr11: 5,249,978- | chr11: 5,254,902- | |
| | | | | | 5,249,979 | 5,254,903 | |
| 150_-32_NA | 0.04% | 11 | 85.11% | False | chr11: 5,249,952- | chr11: 5,254,876- | HBG1/2 c. −95 to −126 |
| | | | | | 5,249,983 | 5,254,907 | |
| 169_-25_NA | 0.04% | 13 | 85.15% | False | chr11: 5,249,971- | chr11: 5,254,895- | HBG1/2 c. −114 to −138 |
| | | | | | 5,249,995 | 5,254,919 | |
| 148_-33_NA | 0.04% | 9 | 85.19% | False | chr11: 5,249,950- | chr11: 5,254,874- | HBG1/2 c. −93 to −125 |
| | | | | | 5,249,982 | 5,254,906 | |
| 166_-36_NA | 0.04% | 10 | 85.22% | False | chr11: 5,249,968- | chr11: 5,254,892- | HBG1/2 c. −111 to −146 |
| | | | | | 5,250,003 | 5,254,927 | |
| 164_-19_NA | 0.04% | 10 | 85.26% | False | chr11: 5,249,966- | chr11: 5,254,890- | HBG1/2 c. −109 to −127 |
| | | | | | 5,249,984 | 5,254,908 | |
| 171_-3_NA | 0.04% | 12 | 85.29% | False | chr11: 5,249,973- | chr11: 5,254,897- | HBG1/2 c. −116 to −118 |
| | | | | | 5,249,975 | 5,254,899 | |
| 169_-21_NA | 0.03% | 10 | 85.33% | False | chr11: 5,249,971- | chr11: 5,254,895- | HBG1/2 c. −114 to −134 |
| | | | | | 5,249,991 | 5,254,915 | |
| 152_-22_NA | 0.03% | 10 | 85.36% | False | chr11: 5,249,954- | chr11: 5,254,878- | HBG1/2 c. −97 to −118 |
| | | | | | 5,249,975 | 5,254,899 | |
| 165_-6_NA; | 0.03% | 10 | 85.40% | False | chr11: 5,249,967- | chr11: 5,254,891- | HBG1/2 c. −110 to −115; |
| 175_-2_NA | | | | | 5,249,972; | 5,254,896; | HBG1/2 c. −120 to −121 |
| | | | | | chr11: 5,249,977- | chr11: 5,254,901- | |
| | | | | | 5,249,978 | 5,254,902 | |
| 162_-311_NA | 0.03% | 1 | 85.43% | True | chr11: 5,249,964- | chr11: 5,254,888- | HBG1/2 c. −107 to −417 |
| | | | | | 5,250,274 | 5,255,198 | |
| 166_-5_NA; | 0.03% | 12 | 85.47% | False | chr11: 5,249,968- | chr11: 5,254,892- | HBG1/2 c. −111 to −115; |
| 174_-2_NA | | | | | 5,249,972; | 5,254,896; | HBG1/2 c. −119 to −120 |
| | | | | | chr11: 5,249,976- | chr11: 5,254,900- | |
| | | | | | 5,249,977 | 5,254,901 | |
| 168_-3_NA; | 0.03% | 10 | 85.50% | False | chr11: 5,249,970- | chr11: 5,254,894- | HBG1/2 c. −113 to −115; |
| 174_-4_NA | | | | | 5,249,972; | 5,254,896; | HBG1/2 c. −119 to −122 |
| | | | | | chr11: 5,249,976- | chr11: 5,254,900- | |
| | | | | | 5,249,979 | 5,254,903 | |
| 161_-15_NA | 0.03% | 12 | 85.54% | False | chr11: 5,249,963- | chr11: 5,254,887- | HBG1/2 c. −106 to −120 |
| | | | | | 5,249,977 | 5,254,901 | |
| 167_-1_NA; | 0.03% | 9 | 85.57% | False; True | chr11: 5,249,969- | chr11: 5,254,893- | HBG1/2 c. −112 to −112; |
| 172_-5_NA | | | | | 5,249,969; | 5,254,893; | HBG1/2 c. −117 to −121 |
| | | | | | chr11: 5,249,974- | chr11: 5,254,898- | |
| | | | | | 5,249,978 | 5,254,902 | |
| 157_-29_NA | 0.03% | 9 | 85.60% | False | chr11: 5,249,959- | chr11: 5,254,883- | HBG1/2 c. −102 to −130 |
| | | | | | 5,249,987 | 5,254,911 | |
| 163_-313_NA | 0.03% | 8 | 85.63% | True | chr11: 5,249,965- | chr11: 5,254,889- | HBG1/2 c. −108 to −420 |
| | | | | | 5,250,277 | 5,255,201 | |
| 152_-25_NA | 0.03% | 10 | 85.67% | False | chr11: 5,249,954- | chr11: 5,254,878- | HBG1/2 c. −97 to −121 |
| | | | | | 5,249,978 | 5,254,902 | |
| 159_-15_NA | 0.03% | 10 | 85.70% | False | chr11: 5,249,961- | chr11: 5,254,885- | HBG1/2 c. −104 to −118 |
| | | | | | 5,249,975 | 5,254,899 | |
| 156_-20_NA | 0.03% | 8 | 85.73% | False | chr11: 5,249,958- | chr11: 5,254,882- | HBG1/2 c. −101 to −120 |
| | | | | | 5,249,977 | 5,254,901 | |
| 157_-21_NA | 0.03% | 10 | 85.76% | False | chr11: 5,249,959- | chr11: 5,254,883- | HBG1/2 c. −102 to −122 |
| | | | | | 5,249,979 | 5,254,903 | |
| 168_-30_NA | 0.03% | 11 | 85.79% | True | chr11: 5,249,970- | chr11: 5,254,894- | HBG1/2 c. −113 to −142 |
| | | | | | 5,249,999 | 5,254,923 | |
| 161_-40_NA | 0.03% | 8 | 85.82% | True | chr11: 5,249,963- | chr11: 5,254,887- | HBG1/2 c. −106 to −145 |
| | | | | | 5,250,002 | 5,254,926 | |
| 172_-18_NA | 0.03% | 10 | 85.85% | False | chr11: 5,249,974- | chr11: 5,254,898- | HBG1/2 c. −117 to −134 |
| | | | | | 5,249,991 | 5,254,915 | |
| 167_-11_NA; | 0.03% | 4 | 85.88% | False | chr11: 5,249,969- | chr11: 5,254,893- | HBG1/2 c. −112 to −122; |
| 180_-2_NA | | | | | 5,249,979; | 5,254,903; | HBG1/2 c. −125 to −126 |
| | | | | | chr11: 5,249,982- | chr11: 5,254,906- | |
| | | | | | 5,249,983 | 5,254,907 | |
| 167_-4_NA; | 0.03% | 9 | 85.91% | False | chr11: 5,249,969- | chr11: 5,254,893- | HBG1/2 c. −112 to −115; |
| 175_-2_NA | | | | | 5,249,972; | 5,254,896; | HBG1/2 c. −120 to −121 |
| | | | | | chr11: 5,249,977- | chr11: 5,254,901- | |
| | | | | | 5,249,978 | 5,254,902 | |
| 166_-5_NA; | 0.03% | 6 | 85.94% | False | chr11: 5,249,968- | chr11: 5,254,892- | HBG1/2 c. −111 to −115; |
| 175_-2_NA | | | | | 5,249,972; | 5,254,896; | HBG1/2 c. −120 to −121 |
| | | | | | chr11: 5,249,977- | chr11: 5,254,901- | |
| | | | | | 5,249,978 | 5,254,902 | |
| 161_-8_NA | 0.03% | 10 | 85.97% | False | chr11: 5,249,963- | chr11: 5,254,887- | HBG1/2 c. −106 to −113 |
| | | | | | 5,249,970 | 5,254,894 | |
| 162_-23_NA | 0.03% | 9 | 86.00% | False | chr11: 5,249,964- | chr11: 5,254,888- | HBG1/2 c. −107 to −129 |
| | | | | | 5,249,986 | 5,254,910 | |
| 156_-30_NA | 0.03% | 8 | 86.03% | False | chr11: 5,249,958- | chr11: 5,254,882- | HBG1/2 c. −101 to −130 |
| | | | | | 5,249,987 | 5,254,911 | |
| 46_-338_NA | 0.03% | 1 | 86.05% | True | chr11: 5,249,848- | chr11: 5,254,772- | HBG1/2 c. 9 to −328 |
| | | | | | 5,250,185 | 5,255,109 | |
| 150_-41_NA | 0.03% | 6 | 86.08% | False | chr11: 5,249,952- | chr11: 5,254,876- | HBG1/2 c. −95 to −135 |
| | | | | | 5,249,992 | 5,254,916 | |
| 154_-20_NA | 0.03% | 11 | 86.11% | False | chr11: 5,249,956- | chr11: 5,254,880- | HBG1/2 c. −99 to −118 |
| | | | | | 5,249,975 | 5,254,899 | |
| 156_-17_NA | 0.03% | 12 | 86.14% | False | chr11: 5,249,958- | chr11: 5,254,882- | HBG1/2 c. −101 to −117 |
| | | | | | 5,249,974 | 5,254,898 | |
| 158_-25_NA | 0.03% | 9 | 86.16% | False | chr11: 5,249,960- | chr11: 5,254,884- | HBG1/2 c. −103 to −127 |
| | | | | | 5,249,984 | 5,254,908 | |
| 161_-32_NA | 0.03% | 10 | 86.19% | False | chr11: 5,249,963- | chr11: 5,254,887- | HBG1/2 c. −106 to −137 |
| | | | | | 5,249,994 | 5,254,918 | |
| 168_-32_NA | 0.03% | 10 | 86.22% | False | chr11: 5,249,970- | chr11: 5,254,894- | HBG1/2 c. −113 to −144 |
| | | | | | 5,250,001 | 5,254,925 | |
| 151_-30_NA | 0.03% | 8 | 86.24% | False | chr11: 5,249,953- | chr11: 5,254,877- | HBG1/2 c. −96 to −125 |
| | | | | | 5,249,982 | 5,254,906 | |
| 156_-40_NA | 0.03% | 5 | 86.27% | False | chr11: 5,249,958- | chr11: 5,254,882- | HBG1/2 c. −101 to −140 |
| | | | | | 5,249,997 | 5,254,921 | |
| 168_-29_NA | 0.03% | 8 | 86.29% | False | chr11: 5,249,970- | chr11: 5,254,894- | HBG1/2 c. −113 to −141 |
| | | | | | 5,249,998 | 5,254,922 | |
| 165_-38_NA | 0.03% | 10 | 86.32% | False | chr11: 5,249,967- | chr11: 5,254,891- | HBG1/2 c. −110 to −147 |
| | | | | | 5,250,004 | 5,254,928 | |
| 165_-2_NA; | 0.03% | 1 | 86.35% | False | chr11: 5,249,967- | chr11: 5,254,891- | HBG1/2 c. −110 to −111; |
| 170_-14_NA; | | | | | 5,249,968; | 5,254,892; | HBG1/2 c. −115 to −128; |
| 188_1_A | | | | | chr11: 5,249,972- | chr11: 5,254,896- | HBG1/2 c. −133 to −131 |
| | | | | | 5,249,985; | 5,254,909; | |
| | | | | | chr11: 5,249,990- | chr11: 5,254,914- | |
| | | | | | 5,249,988 | 5,254,912 | |
| 163_-16_NA | 0.02% | 10 | 86.37% | False | chr11: 5,249,965- | chr11: 5,254,889- | HBG1/2 c. −108 to −123 |
| | | | | | 5,249,980 | 5,254,904 | |
| 172_-2_NA | 0.02% | 9 | 86.39% | False | chr11: 5,249,974- | chr11: 5,254,898- | HBG1/2 c. −117 to −118 |
| | | | | | 5,249,975 | 5,254,899 | |
| 174_-2_NA | 0.02% | 11 | 86.42% | False | chr11: 5,249,976- | chr11: 5,254,900- | HBG1/2 c. −119 to −120 |
| | | | | | 5,249,977 | 5,254,901 | |
| 166_-7_NA; | 0.02% | 6 | 86.44% | False | chr11: 5,249,968- | chr11: 5,254,892- | HBG1/2 c. −111 to −117; |
| 176_-2_NA | | | | | 5,249,974; | 5,254,898; | HBG1/2 c. −121 to −122 |
| | | | | | chr11: 5,249,978- | chr11: 5,254,902- | |
| | | | | | 5,249,979 | 5,254,903 | |
| 160_-21_NA | 0.02% | 11 | 86.47% | False | chr11: 5,249,962- | chr11: 5,254,886- | HBG1/2 c. −105 to −125 |
| | | | | | 5,249,982 | 5,254,906 | |
| 155_-24_NA | 0.02% | 10 | 86.49% | False | chr11: 5,249,957- | chr11: 5,254,881- | HBG1/2 c. −100 to −123 |
| | | | | | 5,249,980 | 5,254,904 | |
| 164_-20_NA | 0.02% | 7 | 86.52% | False | chr11: 5,249,966- | chr11: 5,254,890- | HBG1/2 c. −109 to −128 |
| | | | | | 5,249,985 | 5,254,909 | |
| 169_-8_NA; | 0.02% | 2 | 86.54% | False | chr11: 5,249,971- | chr11: 5,254,895- | HBG1/2 c. −114 to −121; |
| 180_-5_NA | | | | | 5,249,978; | 5,254,902; | HBG1/2 c. −125 to −129 |
| | | | | | chr11: 5,249,982- | chr11: 5,254,906- | |
| | | | | | 5,249,986 | 5,254,910 | |
| 167_-28_NA | 0.02% | 10 | 86.56% | False | chr11: 5,249,969- | chr11: 5,254,893- | HBG1/2 c. −112 to −139 |
| | | | | | 5,249,996 | 5,254,920 | |
| 158_-22_NA | 0.02% | 10 | 86.59% | False | chr11: 5,249,960- | chr11: 5,254,884- | HBG1/2 c. −103 to −124 |
| | | | | | 5,249,981 | 5,254,905 | |
| 164_-16_NA | 0.02% | 11 | 86.61% | False | chr11: 5,249,966- | chr11: 5,254,890- | HBG1/2 c. −109 to −124 |
| | | | | | 5,249,981 | 5,254,905 | |
| 169_-4_NA; | 0.02% | 7 | 86.63% | False | chr11: 5,249,971- | chr11: 5,254,895- | HBG1/2 c. −114 to −117; |
| 175_-2_NA | | | | | 5,249,974; | 5,254,898; | HBG1/2 c. −120 to −121 |
| | | | | | chr11: 5,249,977- | chr11: 5,254,901- | |
| | | | | | 5,249,978 | 5,254,902 | |
| 151_-25_NA | 0.02% | 10 | 86.66% | False | chr11: 5,249,953- | chr11: 5,254,877- | HBG1/2 c. −96 to −120 |
| | | | | | 5,249,977 | 5,254,901 | |
| 165_-6_NA; | 0.02% | 11 | 86.68% | False | chr11: 5,249,967- | chr11: 5,254,891- | HBG1/2 c. −110 to −115; |
| 174_-4_NA | | | | | 5,249,972; | 5,254,896; | HBG1/2 c. −119 to −122 |
| | | | | | chr11: 5,249,976- | chr11: 5,254,900- | |
| | | | | | 5,249,979 | 5,254,903 | |
| 157_-13_NA; | 0.02% | 8 | 86.70% | False; True | chr11: 5,249,959- | chr11: 5,254,883- | HBG1/2 c. −102 to −114; |
| 180_-5_NA | | | | | 5,249,971; | 5,254,895; | HBG1/2 c. −125 to −129 |
| | | | | | chr11: 5,249,982- | chr11: 5,254,906- | |
| | | | | | 5,249,986 | 5,254,910 | |
| 156_-36_NA | 0.02% | 6 | 86.73% | False | chr11: 5,249,958- | chr11: 5,254,882- | HBG1/2 c. −101 to −136 |
| | | | | | 5,249,993 | 5,254,917 | |
| 164_-10_NA; | 0.02% | 1 | 86.75% | False | chr11: 5,249,966- | chr11: 5,254,890- | HBG1/2 c. −109 to −118; |
| 177_-2_NA | | | | | 5,249,975; | 5,254,899; | HBG1/2 c. −122 to −123 |
| | | | | | chr11: 5,249,979- | chr11: 5,254,903- | |
| | | | | | 5,249,980 | 5,254,904 | |
| 166_-293_NA | 0.02% | 2 | 86.77% | False | chr11: 5,249,968- | chr11: 5,254,892- | HBG1/2 c. −111 to −403 |
| | | | | | 5,250,260 | 5,255,184 | |
| 156_-31_NA | 0.02% | 8 | 86.79% | False | chr11: 5,249,958- | chr11: 5,254,882- | HBG1/2 c. −101 to −131 |
| | | | | | 5,249,988 | 5,254,912 | |
| 169_-8_NA; | 0.02% | 4 | 86.82% | False; True | chr11: 5,249,971- | chr11: 5,254,895- | HBG1/2 c. −114 to −121; |
| 180_-4_NA | | | | | 5,249,978; | 5,254,902; | HBG1/2 c. −125 to −128 |
| | | | | | chr11: 5,249,982- | chr11: 5,254,906- | |
| | | | | | 5,249,985 | 5,254,909 | |
| 155_-8_NA; | 0.02% | 1 | 86.84% | False | chr11: 5,249,957- | chr11: 5,254,881- | HBG1/2 c. −100 to −107; |
| 165_-5_NA | | | | | 5,249,964; | 5,254,888; | HBG1/2 c. −110 to −114 |
| | | | | | chr11: 5,249,967- | chr11: 5,254,891- | |
| | | | | | 5,249,971 | 5,254,895 | |
| 167_1_C; | 0.02% | 1 | 86.86% | False | chr11: 5,249,969- | chr11: 5,254,893- | HBG1/2 c. −112 to −110; |
| 171_-4_NA | | | | | 5,249,967; | 5,254,891; | HBG1/2 c. −116 to −119 |
| | | | | | chr11: 5,249,973- | chr11: 5,254,897- | |
| | | | | | 5,249,976 | 5,254,900 | |
| 165_-7_NA; | 0.02% | 6 | 86.88% | False | chr11: 5,249,967- | chr11: 5,254,891- | HBG1/2 c. −110 to −116; |
| 175_-1_NA | | | | | 5,249,973; | 5,254,897; | HBG1/2 c. −120 to −120 |
| | | | | | chr11: 5,249,977- | chr11: 5,254,901- | |
| | | | | | 5,249,977 | 5,254,901 | |
| 160_-20_NA | 0.02% | 11 | 86.91% | False | chr11: 5,249,962- | chr11: 5,254,886- | HBG1/2 c. −105 to −124 |
| | | | | | 5,249,981 | 5,254,905 | |
| 152_-21_NA | 0.02% | 9 | 86.93% | False | chr11: 5,249,954- | chr11: 5,254,878- | HBG1/2 c. −97 to −117 |
| | | | | | 5,249,974 | 5,254,898 | |
| 165_-39_NA | 0.02% | 9 | 86.95% | False | chr11: 5,249,967- | chr11: 5,254,891- | HBG1/2 c. −110 to −148 |
| | | | | | 5,250,005 | 5,254,929 | |
| 164_-4_NA | 0.02% | 7 | 86.97% | False | chr11: 5,249,966- | chr11: 5,254,890- | HBG1/2 c. −109 to −112 |
| | | | | | 5,249,969 | 5,254,893 | |
| 165_-3_NA; | 0.02% | 10 | 86.99% | False | chr11: 5,249,967- | chr11: 5,254,891- | HBG1/2 c. −110 to −112; |
| 171_-3_NA | | | | | 5,249,969; | 5,254,893; | HBG1/2 c. −116 to −118 |
| | | | | | chr11: 5,249,973- | chr11: 5,254,897- | |
| | | | | | 5,249,975 | 5,254,899 | |
| 165_-2_NA; | 0.02% | 9 | 87.02% | False | chr11: 5,249,967- | chr11: 5,254,891- | HBG1/2 c. −110 to −111; |
| 170_-4_NA | | | | | 5,249,968; | 5,254,892; | HBG1/2 c. −115 to −118 |
| | | | | | chr11: 5,249,972- | chr11: 5,254,896- | |
| | | | | | 5,249,975 | 5,254,899 | |
| 160_-11_NA; | 0.02% | 1 | 87.04% | False | chr11: 5,249,962- | chr11: 5,254,886- | HBG1/2 c. −105 to −115; |
| 174_-9_NA | | | | | 5,249,972; | 5,254,896; | HBG1/2 c. −119 to −127 |
| | | | | | chr11: 5,249,976- | chr11: 5,254,900- | |
| | | | | | 5,249,984 | 5,254,908 | |
| 165_-4_NA; | 0.02% | 1 | 87.06% | False | chr11: 5,249,967- | chr11: 5,254,891- | HBG1/2 c. −110 to −113; |
| 171_1_C | | | | | 5,249,970; | 5,254,894; | HBG1/2 c. −116 to −114 |
| | | | | | chr11: 5,249,973- | chr11: 5,254,897- | |
| | | | | | 5,249,971 | 5,254,895 | |
| 168_1_A | 0.02% | 8 | 87.08% | False | chr11: 5,249,970- | chr11: 5,254,894- | HBG1/2 c. −113 to −111 |
| | | | | | 5,249,968 | 5,254,892 | |
| 37_-362_NA | 0.02% | 3 | 87.10% | True | chr11: 5,249,839- | chr11: 5,254,763- | HBG1/2 c. 18 to −343 |
| | | | | | 5,250,200 | 5,255,124 | |
| 152_-54_NA | 0.02% | 7 | 87.12% | True | chr11: 5,249,954- | chr11: 5,254,878- | HBG1/2 c. −97 to −150 |
| | | | | | 5,250,007 | 5,254,931 | |
| 161_-237_NA | 0.02% | 5 | 87.14% | True | chr11: 5,249,963- | chr11: 5,254,887- | HBG1/2 c. −106 to −342 |
| | | | | | 5,250,199 | 5,255,123 | |
| 167_-5_NA; | 0.02% | 6 | 87.16% | False | chr11: 5,249,969- | chr11: 5,254,893- | HBG1/2 c. −112 to −116; |
| 175_-1_NA | | | | | 5,249,973; | 5,254,897; | HBG1/2 c. −120 to −120 |
| | | | | | chr11: 5,249,977- | chr11: 5,254,901- | |
| | | | | | 5,249,977 | 5,254,901 | |
| 165_-30_NA | 0.02% | 7 | 87.18% | False | chr11: 5,249,967- | chr11: 5,254,891- | HBG1/2 c. −110 to −139 |
| | | | | | 5,249,996 | 5,254,920 | |
| 167_-17_NA; | 0.02% | 1 | 87.20% | False; True | chr11: 5,249,969- | chr11: 5,254,893- | HBG1/2 c. −112 to −128; |
| 186_-5_NA | | | | | 5,249,985; | 5,254,909; | HBG1/2 c. −131 to −135 |
| | | | | | chr11: 5,249,988- | chr11: 5,254,912- | |
| | | | | | 5,249,992 | 5,254,916 | |
| 166_-11_NA; | 0.02% | 10 | 87.22% | False | chr11: 5,249,968- | chr11: 5,254,892- | HBG1/2 c. −111 to −121; |
| 180_-1_NA | | | | | 5,249,978; | 5,254,902; | HBG1/2 c. −125 to −125 |
| | | | | | chr11: 5,249,982- | chr11: 5,254,906- | |
| | | | | | 5,249,982 | 5,254,906 | |
| 162_-303_NA | 0.02% | 3 | 87.24% | True | chr11: 5,249,964- | chr11: 5,254,888- | HBG1/2 c. −107 to −409 |
| | | | | | 5,250,266 | 5,255,190 | |
| 166_-32_NA | 0.02% | 10 | 87.26% | False | chr11: 5,249,968- | chr11: 5,254,892- | HBG1/2 c. −111 to −142 |
| | | | | | 5,249,999 | 5,254,923 | |
| 165_-32_NA | 0.02% | 9 | 87.28% | False | chr11: 5,249,967- | chr11: 5,254,891- | HBG1/2 c. −110 to −141 |
| | | | | | 5,249,998 | 5,254,922 | |
| 144_-30_NA | 0.02% | 3 | 87.30% | False | chr11: 5,249,946- | chr11: 5,254,870- | HBG1/2 c. −89 to −118 |
| | | | | | 5,249,975 | 5,254,899 | |
| 158_-10_NA; | 0.02% | 3 | 87.32% | False | chr11: 5,249,960- | chr11: 5,254,884- | HBG1/2 c. −103 to −112; |
| 171_-2_NA | | | | | 5,249,969; | 5,254,893; | HBG1/2 c. −116 to −117 |
| | | | | | chr11: 5,249,973- | chr11: 5,254,897- | |
| | | | | | 5,249,974 | 5,254,898 | |
| 165_-4_NA; | 0.02% | 3 | 87.34% | False | chr11: 5,249,967- | chr11: 5,254,891- | HBG1/2 c. −110 to −113; |
| 172_-7_NA | | | | | 5,249,970; | 5,254,894; | HBG1/2 c. −117 to −123 |
| | | | | | chr11: 5,249,974- | chr11: 5,254,898- | |
| | | | | | 5,249,980 | 5,254,904 | |
| 167_-30_NA | 0.02% | 8 | 87.36% | False | chr11: 5,249,969- | chr11: 5,254,893- | HBG1/2 c. −112 to −141 |
| | | | | | 5,249,998 | 5,254,922 | |
| 169_-2_NA; | 0.02% | 3 | 87.37% | False | chr11: 5,249,971- | chr11: 5,254,895- | HBG1/2 c. −114 to −115; |
| 173_1_A | | | | | 5,249,972; | 5,254,896; | HBG1/2 c. −118 to −116 |
| | | | | | chr11: 5,249,975- | chr11: 5,254,899- | |
| | | | | | 5,249,973 | 5,254,897 | |
| 167_-2_NA; | 0.02% | 1 | 87.39% | False | chr11: 5,249,969- | chr11: 5,254,893- | HBG1/2 c. −112 to −113; |
| 170_4_GCAA | | | | | 5,249,970; | 5,254,894; | HBG1/2 c. −115 to −110 |
| | | | | | chr11: 5,249,972- | chr11: 5,254,896- | |
| | | | | | 5,249,967 | 5,254,891 | |
| 166_1_C; | 0.02% | 9 | 87.41% | False | chr11: 5,249,968- | chr11: 5,254,892- | HBG1/2 c. −111 to −109; |
| 167_-4_NA | | | | | 5,249,966; | 5,254,890; | HBG1/2 c. −112 to −115 |
| | | | | | chr11: 5,249,969- | chr11: 5,254,893- | |
| | | | | | 5,249,972 | 5,254,896 | |
| 170_-24_NA | 0.02% | 11 | 87.43% | False | chr11: 5,249,972- | chr11: 5,254,896- | HBG1/2 c. −115 to −138 |
| | | | | | 5,249,995 | 5,254,919 | |
| 167_-2_NA; | 0.02% | 10 | 87.44% | False | chr11: 5,249,969- | chr11: 5,254,893- | HBG1/2 c. −112 to −113; |
| 171_-3_NA | | | | | 5,249,970; | 5,254,894; | HBG1/2 c. −116 to −118 |
| | | | | | chr11: 5,249,973- | chr11: 5,254,897- | |
| | | | | | 5,249,975 | 5,254,899 | |
| 162_-10_NA; | 0.02% | 1 | 87.46% | False | chr11: 5,249,964- | chr11: 5,254,888- | HBG1/2 c. −107 to −116; |
| 177_1_T | | | | | 5,249,973; | 5,254,897; | HBG1/2 c. −122 to −120 |
| | | | | | chr11: 5,249,979- | chr11: 5,254,903- | |
| | | | | | 5,249,977 | 5,254,901 | |
| 124_-288_NA | 0.02% | 1 | 87.48% | True | chr11: 5,249,926- | chr11: 5,254,850- | HBG1/2 c. −69 to −356 |
| | | | | | 5,250,213 | 5,255,137 | |
| 159_-20_NA | 0.02% | 10 | 87.49% | False | chr11: 5,249,961- | chr11: 5,254,885- | HBG1/2 c. −104 to −123 |
| | | | | | 5,249,980 | 5,254,904 | |
| 161_-21_NA | 0.02% | 8 | 87.51% | False | chr11: 5,249,963- | chr11: 5,254,887- | HBG1/2 c. −106 to −126 |
| | | | | | 5,249,983 | 5,254,907 | |
| 160_-7_NA; | 0.02% | 1 | 87.53% | False | chr11: 5,249,962- | chr11: 5,254,886- | HBG1/2 c. −105 to −111; |
| 169_-2_NA; | | | | | 5,249,968; | 5,254,892; | HBG1/2 c. −114 to −115; |
| 173_-2_NA | | | | | chr11: 5,249,971- | chr11: 5,254,895- | HBG1/2 c. −118 to −119 |
| | | | | | 5,249,972; | 5,254,896; | |
| | | | | | chr11: 5,249,975- | chr11: 5,254,899- | |
| | | | | | 5,249,976 | 5,254,900 | |
| 156_-14_NA | 0.02% | 7 | 87.55% | False | chr11: 5,249,958- | chr11: 5,254,882- | HBG1/2 c. −101 to −114 |
| | | | | | 5,249,971 | 5,254,895 | |
| 159_-272_NA | 0.02% | 1 | 87.56% | True | chr11: 5,249,961- | chr11: 5,254,885- | HBG1/2 c. −104 to −375 |
| | | | | | 5,250,232 | 5,255,156 | |
| 166_-11_NA; | 0.02% | 6 | 87.58% | False; True | chr11: 5,249,968- | chr11: 5,254,892- | HBG1/2 c. −111 to −121; |
| 180_-4_NA | | | | | 5,249,978; | 5,254,902; | HBG1/2 c. −125 to −128 |
| | | | | | chr11: 5,249,982- | chr11: 5,254,906- | |
| | | | | | 5,249,985 | 5,254,909 | |
| 167_8_GAAAAATT; | 0.02% | 1 | 87.59% | False | chr11: 5,249,969- | chr11: 5,254,893- | HBG1/2 c. −112 to −103; |
| 170_-8_NA | | | | | 5,249,960; | 5,254,884; | HBG1/2 c. −115 to −122 |
| | | | | | chr11: 5,249,972- | chr11: 5,254,896- | |
| | | | | | 5,249,979 | 5,254,903 | |
| 166_-11_NA; | 0.02% | 2 | 87.61% | False | chr11: 5,249,968- | chr11: 5,254,892- | HBG1/2 c. −111 to −121; |
| 178_1_G | | | | | 5,249,978; | 5,254,902; | HBG1/2 c. −123 to −121 |
| | | | | | chr11: 5,249,980- | chr11: 5,254,904- | |
| | | | | | 5,249,978 | 5,254,902 | |
| 169_-8_NA; | 0.02% | 8 | 87.63% | False | chr11: 5,249,971- | chr11: 5,254,895- | HBG1/2 c. −114 to −121; |
| 180_-1_NA | | | | | 5,249,978; | 5,254,902; | HBG1/2 c. −125 to −125 |
| | | | | | chr11: 5,249,982- | chr11: 5,254,906- | |
| | | | | | 5,249,982 | 5,254,906 | |
| 158_-11_NA | 0.02% | 6 | 87.64% | False | chr11: 5,249,960- | chr11: 5,254,884- | HBG1/2 c. −103 to −113 |
| | | | | | 5,249,970 | 5,254,894 | |
| 173_1_T | 0.02% | 3 | 87.66% | False | chr11: 5,249,975- | chr11: 5,254,899- | HBG1/2 c. −118 to −116 |
| | | | | | 5,249,973 | 5,254,897 | |
| 168_-34_NA | 0.02% | 6 | 87.68% | False | chr11: 5,249,970- | chr11: 5,254,894- | HBG1/2 c. −113 to −146 |
| | | | | | 5,250,003 | 5,254,927 | |
| 172_-20_NA | 0.02% | 8 | 87.69% | True | chr11: 5,249,974- | chr11: 5,254,898- | HBG1/2 c. −117 to −136 |
| | | | | | 5,249,993 | 5,254,917 | |
| 166_-275_NA | 0.02% | 1 | 87.71% | False | chr11: 5,249,968- | chr11: 5,254,892- | HBG1/2 c. −111 to −385 |
| | | | | | 5,250,242 | 5,255,166 | |
| 156_-47_NA | 0.02% | 3 | 87.72% | False | chr11: 5,249,958- | chr11: 5,254,882- | HBG1/2 c. −101 to −147 |
| | | | | | 5,250,004 | 5,254,928 | |
| 168_-8_NA; | 0.02% | 2 | 87.74% | False | chr11: 5,249,970- | chr11: 5,254,894- | HBG1/2 c. −113 to −120; |
| 178_-2_NA | | | | | 5,249,977; | 5,254,901; | HBG1/2 c. −123 to −124 |
| | | | | | chr11: 5,249,980- | chr11: 5,254,904- | |
| | | | | | 5,249,981 | 5,254,905 | |
| 164_-31_NA | 0.02% | 6 | 87.75% | False | chr11: 5,249,966- | chr11: 5,254,890- | HBG1/2 c. −109 to −139 |
| | | | | | 5,249,996 | 5,254,920 | |
| 159_-318_NA | 0.02% | 2 | 87.77% | True | chr11: 5,249,961- | chr11: 5,254,885- | HBG1/2 c. −104 to −421 |
| | | | | | 5,250,278 | 5,255,202 | |
| 166_-1_NA; | 0.01% | 1 | 87.78% | False | chr11: 5,249,968- | chr11: 5,254,892- | HBG1/2 c. −111 to −111; |
| 168_-230_NA | | | | | 5,249,968; | 5,254,892; | HBG1/2 c. −113 to −342 |
| | | | | | chr11: 5,249,970- | chr11: 5,254,894- | |
| | | | | | 5,250,199 | 5,255,123 | |
| 111_-260_NA | 0.01% | 1 | 87.80% | False | chr11: 5,249,913- | chr11: 5,254,837- | HBG1/2 c. −56 to −315 |
| | | | | | 5,250,172 | 5,255,096 | |
| 166_-272_NA | 0.01% | 6 | 87.81% | True | chr11: 5,249,968- | chr11: 5,254,892- | HBG1/2 c. −111 to −382 |
| | | | | | 5,250,239 | 5,255,163 | |
| 166_-4_NA; | 0.01% | 4 | 87.83% | False | chr11: 5,249,968- | chr11: 5,254,892- | HBG1/2 c. −111 to −114; |
| 171_2_AC | | | | | 5,249,971; | 5,254,895; | HBG1/2 c. −116 to −113 |
| | | | | | chr11: 5,249,973- | chr11: 5,254,897- | |
| | | | | | 5,249,970 | 5,254,894 | |
| 164_-3_NA; | 0.01% | 1 | 87.84% | False | chr11: 5,249,966- | chr11: 5,254,890- | HBG1/2 c. −109 to −111; |
| 171_3_GGC | | | | | 5,249,968; | 5,254,892; | HBG1/2 c. −116 to −112 |
| | | | | | chr11: 5,249,973- | chr11: 5,254,897- | |
| | | | | | 5,249,969 | 5,254,893 | |
| 166_-10_NA; | 0.01% | 4 | 87.86% | False | chr11: 5,249,968- | chr11: 5,254,892- | HBG1/2 c. −111 to −120; |
| 178_-1_NA | | | | | 5,249,977; | 5,254,901; | HBG1/2 c. −123 to −123 |
| | | | | | chr11: 5,249,980- | chr11: 5,254,904- | |
| | | | | | 5,249,980 | 5,254,904 | |
| 167_-307_NA | 0.01% | 1 | 87.87% | False | chr11: 5,249,969- | chr11: 5,254,893- | HBG1/2 c. −112 to −418 |
| | | | | | 5,250,275 | 5,255,199 | |
| 165_-308_NA | 0.01% | 2 | 87.88% | False | chr11: 5,249,967- | chr11: 5,254,891- | HBG1/2 c. −110 to −417 |
| | | | | | 5,250,274 | 5,255,198 | |
| 158_-2_NA; | 0.01% | 1 | 87.90% | False | chr11: 5,249,960- | chr11: 5,254,884- | HBG1/2 c. −103 to −104; |
| 162_-9_NA | | | | | 5,249,961; | 5,254,885; | HBG1/2 c. −107 to −115 |
| | | | | | chr11: 5,249,964- | chr11: 5,254,888- | |
| | | | | | 5,249,972 | 5,254,896 | |
| 155_-22_NA; | 0.01% | 1 | 87.91% | False | chr11: 5,249,957- | chr11: 5,254,881- | HBG1/2 c. −100 to −121; |
| 182_-1_NA | | | | | 5,249,978; | 5,254,902; | HBG1/2 c. −127 to −127 |
| | | | | | chr11: 5,249,984- | chr11: 5,254,908- | |
| | | | | | 5,249,984 | 5,254,908 | |
| 138_-32_NA; | 0.01% | 1 | 87.92% | False | chr11: 5,249,940- | chr11: 5,254,864- | HBG1/2 c. −83 to −114; |
| 174_-3_NA | | | | | 5,249,971; | 5,254,895; | HBG1/2 c. −119 to −121 |
| | | | | | chr11: 5,249,976- | chr11: 5,254,900- | |
| | | | | | 5,249,978 | 5,254,902 | |
| 140_-52_NA | 0.01% | 2 | 87.94% | False | chr11: 5,249,942- | chr11: 5,254,866- | HBG1/2 c. −85 to −136 |
| | | | | | 5,249,993 | 5,254,917 | |
| 155_-22_NA | 0.01% | 5 | 87.95% | False | chr11: 5,249,957- | chr11: 5,254,881- | HBG1/2 c. −100 to −121 |
| | | | | | 5,249,978 | 5,254,902 | |
| 166_-5_NA; | 0.01% | 1 | 87.96% | False | chr11: 5,249,968- | chr11: 5,254,892- | HBG1/2 c. −111 to −115; |
| 174_-8_NA; | | | | | 5,249,972; | 5,254,896; | HBG1/2 c. −119 to −126; |
| 184_-1_NA | | | | | chr11: 5,249,976- | chr11: 5,254,900- | HBG1/2 c. −129 to −129 |
| | | | | | 5,249,983; | 5,254,907; | |
| | | | | | chr11: 5,249,986- | chr11: 5,254,910- | |
| | | | | | 5,249,986 | 5,254,910 | |
| 164_-8_NA; | 0.01% | 5 | 87.97% | False | chr11: 5,249,966- | chr11: 5,254,890- | HBG1/2 c. −109 to −116; |
| 175_-3_NA | | | | | 5,249,973; | 5,254,897; | HBG1/2 c. −120 to −122 |
| | | | | | chr11: 5,249,977- | chr11: 5,254,901- | |
| | | | | | 5,249,979 | 5,254,903 | |
| 150_-10_NA; | 0.01% | 1 | 87.99% | False; True | chr11: 5,249,952- | chr11: 5,254,876- | HBG1/2 c. −95 to −104; |
| 162_-7_NA | | | | | 5,249,961; | 5,254,885; | HBG1/2 c. −107 to −113 |
| | | | | | chr11: 5,249,964- | chr11: 5,254,888- | |
| | | | | | 5,249,970 | 5,254,894 | |
| 151_-37_NA | 0.01% | 6 | 88.00% | False | chr11: 5,249,953- | chr11: 5,254,877- | HBG1/2 c. −96 to −132 |
| | | | | | 5,249,989 | 5,254,913 | |
| 156_-270_NA | 0.01% | 1 | 88.01% | True | chr11: 5,249,958- | chr11: 5,254,882- | HBG1/2 c. −101 to −370 |
| | | | | | 5,250,227 | 5,255,151 | |
| 144_-47_NA | 0.01% | 4 | 88.02% | False | chr11: 5,249,946- | chr11: 5,254,870- | HBG1/2 c. −89 to −135 |
| | | | | | 5,249,992 | 5,254,916 | |
| 79_-340_NA | 0.01% | 1 | 88.03% | True | chr11: 5,249,881- | chr11: 5,254,805- | HBG1/2 c. −24 to −363 |
| | | | | | 5,250,220 | 5,255,144 | |
| 166_2_CA; | 0.01% | 3 | 88.05% | False | chr11: 5,249,968- | chr11: 5,254,892- | HBG1/2 c. −111 to −108; |
| 167_-4_NA | | | | | 5,249,965; | 5,254,889; | HBG1/2 c. −112 to −115 |
| | | | | | chr11: 5,249,969- | chr11: 5,254,893- | |
| | | | | | 5,249,972 | 5,254,896 | |
| 147_-25_NA | 0.01% | 4 | 88.06% | False | chr11: 5,249,949- | chr11: 5,254,873- | HBG1/2 c. −92 to −116 |
| | | | | | 5,249,973 | 5,254,897 | |
| 168_-7_NA; | 0.01% | 3 | 88.07% | False | chr11: 5,249,970- | chr11: 5,254,894- | HBG1/2 c. −113 to −119; |
| 176_1_A | | | | | 5,249,976; | 5,254,900; | HBG1/2 c. −121 to −119 |
| | | | | | chr11: 5,249,978- | chr11: 5,254,902- | |
| | | | | | 5,249,976 | 5,254,900 | |
| 168_-1_NA; | 0.01% | 1 | 88.08% | False | chr11: 5,249,970- | chr11: 5,254,894- | HBG1/2 c. −113 to −113; |
| 170_-66_NA | | | | | 5,249,970; | 5,254,894; | HBG1/2 c. −115 to −180 |
| | | | | | chr11: 5,249,972- | chr11: 5,254,896- | |
| | | | | | 5,250,037 | 5,254,961 | |
| 162_-3_NA; | 0.01% | 2 | 88.09% | False | chr11: 5,249,964- | chr11: 5,254,888- | HBG1/2 c. −107 to −109; |
| 167_-9_NA | | | | | 5,249,966; | 5,254,890; | HBG1/2 c. −112 to −120 |
| | | | | | chr11: 5,249,969- | chr11: 5,254,893- | |
| | | | | | 5,249,977 | 5,254,901 | |
| 124_-267_NA | 0.01% | 1 | 88.10% | True | chr11: 5,249,926- | chr11: 5,254,850- | HBG1/2 c. −69 to −335 |
| | | | | | 5,250,192 | 5,255,116 | |
| 156_-9_NA; | 0.01% | 1 | 88.11% | False | chr11: 5,249,958- | chr11: 5,254,882- | HBG1/2 c. −101 to −109; |
| 169_-1_NA; | | | | | 5,249,966; | 5,254,890; | HBG1/2 c. −114 to −114; |
| 175_-1_NA | | | | | chr11: 5,249,971- | chr11: 5,254,895- | HBG1/2 c. −120 to −120 |
| | | | | | 5,249,971; | 5,254,895; | |
| | | | | | chr11: 5,249,977- | chr11: 5,254,901- | |
| | | | | | 5,249,977 | 5,254,901 | |
| 159_4_TGAC; | 0.01% | 1 | 88.12% | False | chr11: 5,249,961- | chr11: 5,254,885- | HBG1/2 c. −104 to −99; |
| 162_-3_NA; | | | | | 5,249,956; | 5,254,880; | HBG1/2 c. −107 to −109; |
| 167_3_GCC | | | | | chr11: 5,249,964- | chr11: 5,254,888- | HBG1/2 c. −112 to −108 |
| | | | | | 5,249,966; | 5,254,890; | |
| | | | | | chr11: 5,249,969- | chr11: 5,254,893- | |
| | | | | | 5,249,965 | 5,254,889 | |
| 169_-1_NA; | 0.01% | 5 | 88.13% | False | chr11: 5,249,971- | chr11: 5,254,895- | HBG1/2 c. −114 to −114; |
| 173_-3_NA | | | | | 5,249,971; | 5,254,895; | HBG1/2 c. −118 to −120 |
| | | | | | chr11: 5,249,975- | chr11: 5,254,899- | |
| | | | | | 5,249,977 | 5,254,901 | |
| 152_-19_NA; | 0.01% | 1 | 88.14% | False | chr11: 5,249,954- | chr11: 5,254,878- | HBG1/2 c. −97 to −115; |
| 176_-2_NA | | | | | 5,249,972; | 5,254,896; | HBG1/2 c. −121 to −122 |
| | | | | | chr11: 5,249,978- | chr11: 5,254,902- | |
| | | | | | 5,249,979 | 5,254,903 | |
| 42_-176_NA | 0.01% | 2 | 88.15% | False | chr11: 5,249,844- | chr11: 5,254,768- | HBG1/2 c. 13 to −162 |
| | | | | | 5,250,019 | 5,254,943 | |
| 169_-37_NA | 0.01% | 1 | 88.16% | True | chr11: 5,249,971- | chr11: 5,254,895- | HBG1/2 c. −114 to −150 |
| | | | | | 5,250,007 | 5,254,931 | |
| 159_-301_NA | 0.01% | 1 | 88.17% | True | chr11: 5,249,961- | chr11: 5,254,885- | HBG1/2 c. −104 to −404 |
| | | | | | 5,250,261 | 5,255,185 | |
| 169_-64_NA | 0.01% | 5 | 88.18% | True | chr11: 5,249,971- | chr11: 5,254,895- | HBG1/2 c. −114 to −177 |
| | | | | | 5,250,034 | 5,254,958 | |
| 147_-41_NA | 0.01% | 2 | 88.19% | False | chr11: 5,249,949- | chr11: 5,254,873- | HBG1/2 c. −92 to −132 |
| | | | | | 5,249,989 | 5,254,913 | |
| 140_-31_NA; | 0.01% | 1 | 88.20% | False | chr11: 5,249,942- | chr11: 5,254,866- | HBG1/2 c. −85 to −115; |
| 177_-1_NA | | | | | 5,249,972; | 5,254,896; | HBG1/2 c. −122 to −122 |
| | | | | | chr11: 5,249,979- | chr11: 5,254,903- | |
| | | | | | 5,249,979 | 5,254,903 | |
| 170_-1_NA; | 0.01% | 2 | 88.21% | False | chr11: 5,249,972- | chr11: 5,254,896- | HBG1/2 c. −115 to −115; |
| 172_-303_NA | | | | | 5,249,972; | 5,254,896; | HBG1/2 c. −117 to −419 |
| | | | | | chr11: 5,249,974- | chr11: 5,254,898- | |
| | | | | | 5,250,276 | 5,255,200 | |
| 166_-4_NA; | 0.01% | 1 | 88.22% | False | chr11: 5,249,968- | chr11: 5,254,892- | HBG1/2 c. −111 to −114; |
| 172_-21_NA | | | | | 5,249,971; | 5,254,895; | HBG1/2 c. −117 to −137 |
| | | | | | chr11: 5,249,974- | chr11: 5,254,898- | |
| | | | | | 5,249,994 | 5,254,918 | |
| 166_-7_NA; | 0.01% | 1 | 88.23% | False | chr11: 5,249,968- | chr11: 5,254,892- | HBG1/2 c. −111 to −117; |
| 177_2_CC | | | | | 5,249,974; | 5,254,898; | HBG1/2 c. −122 to −119 |
| | | | | | chr11: 5,249,979- | chr11: 5,254,903- | |
| | | | | | 5,249,976 | 5,254,900 | |
| 152_-254_NA | 0.01% | 1 | 88.23% | True | chr11: 5,249,954- | chr11: 5,254,878- | HBG1/2 c. −97 to −350 |
| | | | | | 5,250,207 | 5,255,131 | |
| 165_-4_NA; | 0.01% | 3 | 88.24% | False; True | chr11: 5,249,967- | chr11: 5,254,891- | HBG1/2 c. −110 to −113; |
| 172_-5_NA | | | | | 5,249,970; | 5,254,894; | HBG1/2 c. −117 to −121 |
| | | | | | chr11: 5,249,974- | chr11: 5,254,898- | |
| | | | | | 5,249,978 | 5,254,902 | |
| 174_-13_NA | 0.01% | 5 | 88.25% | False | chr11: 5,249,976- | chr11: 5,254,900- | HBG1/2 c. −119 to −131 |
| | | | | | 5,249,988 | 5,254,912 | |
| 154_-17_NA; | 0.01% | 1 | 88.26% | False | chr11: 5,249,956- | chr11: 5,254,880- | HBG1/2 c. −99 to −115; |
| 175_-6_NA | | | | | 5,249,972; | 5,254,896; | HBG1/2 c. −120 to −125 |
| | | | | | chr11: 5,249,977- | chr11: 5,254,901- | |
| | | | | | 5,249,982 | 5,254,906 | |
| 161_-9_NA; | 0.01% | 1 | 88.27% | False; True | chr11: 5,249,963- | chr11: 5,254,887- | HBG1/2 c. −106 to −114; |
| 172_-20_NA | | | | | 5,249,971; | 5,254,895; | HBG1/2 c. −117 to −136 |
| | | | | | chr11: 5,249,974- | chr11: 5,254,898- | |
| | | | | | 5,249,993 | 5,254,917 | |
| 132_-42_NA | 0.01% | 1 | 88.28% | False | chr11: 5,249,934- | chr11: 5,254,858- | HBG1/2 c. −77 to −118 |
| | | | | | 5,249,975 | 5,254,899 | |
| 162_-259_NA | 0.01% | 2 | 88.29% | False | chr11: 5,249,964- | chr11: 5,254,888- | HBG1/2 c. −107 to −365 |
| | | | | | 5,250,222 | 5,255,146 | |
| 166_-18_NA | 0.01% | 2 | 88.29% | True | chr11: 5,249,968- | chr11: 5,254,892- | HBG1/2 c. −111 to −128 |
| | | | | | 5,249,985 | 5,254,909 | |
| 145_-25_NA | 0.01% | 1 | 88.30% | False | chr11: 5,249,947- | chr11: 5,254,871- | HBG1/2 c. −90 to −114 |
| | | | | | 5,249,971 | 5,254,895 | |
| 148_-29_NA | 0.01% | 1 | 88.31% | False | chr11: 5,249,950- | chr11: 5,254,874- | HBG1/2 c. −93 to −121 |
| | | | | | 5,249,978 | 5,254,902 | |
| 144_-327_NA | 0.01% | 1 | 88.32% | False | chr11: 5,249,946- | chr11: 5,254,870- | HBG1/2 c. −89 to −415 |
| | | | | | 5,250,272 | 5,255,196 | |
| 169_-274_NA | 0.01% | 1 | 88.33% | False | chr11: 5,249,971- | chr11: 5,254,895- | HBG1/2 c. −114 to −387 |
| | | | | | 5,250,244 | 5,255,168 | |

The Indel_id is a string identifying the indel, shown as indel_start_position + _ + indel_length + _ + ID. Where ID is NA for deletions and for insertions is the sequence inserted. Positive values indicate insertions and negative values indicate deletions.
The average percentage (“AVE % in indel”) is the average percentage of each indel_ID amongst all indels detected in a sample. The average is calculated from n = 14 samples.
“Cts” = counts and provides the number of samples in which the indel was identified.
“Cum. Sum” = Cumulative sum and the cumulative percentage of indels, e.g. the top ten most abuntant indels account for 45.03% of all indels.
In the column labeled MMEJ, “True” indicates the repair was mediated via MMEJ, and “False” indicates the repair was mediated via NHEJ.
The genomic coordinates at HBG1 or HBG2 are reported using the One-based coordinate system, “Homo sapiens chromosome 11, GRCh38.p12 Primary Assembly,” (Version NC_000011.10), NCBI Reference Sequence NC_000011.
The HBG1/2 position indicates the deletion relative to the TSS.

### SEQUENCES

[0498] Genome editing system components according to the present disclosure (including without limitation, RNA-guided nucleases, guide RNAs, donor template nucleic acids, nucleic acids encoding nucleases or guide RNAs, and portions or fragments of any of the foregoing), are exemplified by the nucleotide and amino acid sequences presented in the Sequence Listing. The sequences presented in the Sequence Listing are not intended to be limiting, but rather illustrative of certain principles of genome editing systems and their component parts, which, in combination with the instant disclosure, will inform those of skill in the art about additional implementations and modifications that are within the scope of this disclosure.

### INCORPORATION BY REFERENCE

[0499] All publications, patents, and patent applications mentioned herein are hereby incorporated by reference in their entirety as if each individual publication, patent or patent application was specifically and individually indicated to be incorporated by reference. In case of conflict, the present application, including any definitions herein, will control.

### EQUIVALENTS

[0500] Those skilled in the art will recognize, or be able to ascertain using no more than routine experimentation, many equivalents to the specific embodiments described herein. Such equivalents are intended to be encompassed by the following claims.

### REFERENCES

[0501] Ahern et al., Br J Haematol 25(4):437-444 (1973)
[0502] Akinbami Hemoglobin 40:64-65 (2016)
[0503] Aliyu et al. Am J Hematol 83:63-70 (2008)
[0504] Anders et al. Nature 513(7519):569-573 (2014)
[0505] Angastiniotis & Modell Ann N Y Acad Sci 850:251-269 (1998)
[0506] Bae et al. Bioinformatics 30(10):1473-1475 (2014)
[0507] Barbosa et al. Braz J Med Bio Res 43(8):705-711 (2010)
[0508] Bauer et al. Nat. Med. 25(5):776-783 (2019)
[0509] Bothmer et al. CRISPR J 3(3):177-187 (2020)
[0510] Bouva Hematologica 91(1):129-132 (2006)
[0511] Briner et al. Mol Cell 56(2):333-339 (2014)
[0512] Brousseau Am J Hematol 85(1):77-78 (2010)
[0513] Caldecott Nat Rev Genet 9(8):619-631 (2008)
[0514] Canvers et al. Nature 527(12):192-197 (2015)
[0515] Chang et al. Mol Ther Methods Clin Dev 4:137-148 (2017)
[0516] Chassanidis Ann Hematol 88(6):549-555 (2009)
[0517] Chylinski et al. RNA Biol 10(5):726-737 (2013)
[0518] Cong et al. Science 399(6121):819-823 (2013)
[0519] Costa et al., Cad Saude Publica 18(5):1469-1471 (2002)
[0520] Davis & Maizels 2 Proc Natl Acad Sci USA 11 1(10):E924-932 (2014)
[0521] Fine et al. Sci Rep. 5:10777 (2015)
[0522] Frit et al. DNA Repair (Amst) 17:81-97 (2014)
[0523] Fu et al. Nat Biotechnol 32:279-284 (2014)
[0524] Gao et al. Nat Biotechnol.: 35(8):789-792 (2017)
[0525] Giarratana et al. Nat Biotechnol. 23(1):69-74 (2005)
[0526] Giarratana et al. Blood:118, 5071-5079 (2011)
[0527] Giannoukos et al. BMC Genomics 19(1):212 (2018)
[0528] Guilinger et al. Nat Biotechnol 32:577-582 (2014)
[0529] Heigwer et al. Nat Methods 11(2):122-123 (2014)
[0530] Hsu et al. Nat Biotechnol 31(9):827-832 (2013)
[0531] Iyama & Wilson DNA Repair (Amst) 12(8):620-636 (2013)
[0532] Jiang et al. Nat Biotechnol 31(3):233-239 (2013)
[0533] Jinek et al. Science 337(6096):816-821 (2012)
[0534] Jinek et al. Science 343(6176):1247997 (2014)
[0535] Kleinstiver et al. Nature 523(7561):481-485 (2015a)
[0536] Kleinstiver et al. Nat Biotechnol 33(12):1293-1298 (2015b)
[0537] Kleinstiver et al. Nature 529(7587):490-495 (2016)
[0538] Kleinstiver et al. Nat Biotechnol 37(3):276-282 (2019)
[0539] Komor et al. Nature 533(7603):420-424 (2016)
[0540] Kosicki et al. Nat Biotechnol 36(8): 765-771 (2018)
[0541] Lee et al. Nano Lett 12(12):6322-6327 (2012)
[0542] Lewis “Medical-Surgical Nursing: Assessment and Management of Clinical Problems” (2014)
[0543] Li Cell Res 18(1):85-98 (2008)
[0544] Makarova et al. Nat Rev Microbiol 9(6):467-477 (2011)
[0545] Mali et al. Science 339(6121):823-826 (2013)
[0546] Mantovani et al. Nucleic Acids Res 16(16):7783-7797 (1988)
[0547] Masala Methods Enzymol. 231:21-44 (1994)
[0548] Marteijn et al. Nat Rev Mol Cell Biol 15(7):465-481 (2014)
[0549] Martyn et al., Biochim Biophys Acta 1860(5):525-536 (2017)
[0550] Métais et al. Blood Adv. 3(21):3379-92 (2019)
[0551] Nishimasu et al. Cell 156(5):935-949 (2014)
[0552] Nishimasu et al. Cell 162:1113-1126 (2015)
[0553] Notta et al. Science 333(6039):218-21 (2011)
[0554] Pausch et al. Science 369(6501):333-337 (2020)
[0555] Ran & Hsu Cell 154(6):1380-1389 (2013)
[0556] Richardson et al. Nat Biotechnol 34:339-344 (2016)
[0557] Swarts et al. May 22:e1481. doi: 10.1002/wrna.1481. Epub ahead of print. PMID: 29790280 (2018)
[0558] Shmakov et al. Molecular Cell 60(3):385-397 (2015)
[0559] Sternberg et al. Nature 507(7490):62-67 (2014)
[0560] Strohkendl et al. Mol. Cell 71:816-824 (2018)
[0561] Superti-Furga et al. EMBO J 7(10):3099-3107 (1988)
[0562] Thein Hum Mol Genet 18(R2):R216-223 (2009)
[0563] Thorpe et al. Br J Haematol. 87(1):125-132 (1994)
[0564] Tsai et al. Nat Biotechnol 34(5): 483 (2016)
[0565] Waber et al. Blood 67(2):551-554 (1986)
[0566] Wang et al. Cell 153(4):910-918 (2013)
[0567] Weber et al. Sci Adv. 6(7):eaay9392 (2020)
[0568] Wu et al. Nat. Med. 25(5): 776-83 (2019)
[0569] Xiao et al. Bioinformatics 30(8):1180-1182 (2014)
[0570] Xu et al. Genes Dev 24(8):783-798 (2010)
[0571] Yamano et al. Cell 165(4): 949-962 (2016)
[0572] Zetsche et al. Nat Biotechnol 33(2):139-42 (2015)

1. A first population of modified cells comprising
a plurality of modified CD34+ or hematopoietic stem cells,
one or more of the plurality of modified cells having an indel in an HBG gene promoter,
the plurality of modified cells as a whole including a HBG1/2 c.−104 to −121 deletion in a HBG1 promoter, a HBG2 promoter, or a combination thereof, and
the HBG1/2 c.−104 to −121 deletion making up 2% or more of the indels in the plurality of modified cells as a whole.

2. (canceled)

3. A first population of modified cells comprising
a plurality of modified CD34+ or hematopoietic stem cells,
one or more of the plurality of modified cells including an indel in an HBG gene promoter, and
60% or more of the indels in the plurality of modified cells as a whole are deletions of at least 4 base pairs.

4-30. (canceled)

31. A method of inducing expression of fetal hemoglobin (HbF) in a first population of modified cells comprising a plurality of modified CD34+ or hematopoietic stem cells, the method comprising:
delivering a first RNP complex including a first guide RNA (gRNA) and a Cpf1 RNA-guided nuclease or a modified Cpf1 RNA-guided nuclease to a first population of unmodified cells comprising a plurality of unmodified CD34+ or hematopoietic stem cells to generate indels, the first gRNA including a first gRNA targeting domain,
each modified CD34+ or hematopoietic stem cell comprising an indel in an HBG gene promoter,
60% or more of the indels in the plurality of modified cells as a whole are deletions of at least 4 base pairs;
the first population of modified cells comprising higher HbF levels than the first population of unmodified cells.

32. (canceled)

33. A method of decreasing sickling in a first population of red blood cells (RBCs) cultured from a first population of modified cells comprising a plurality of modified CD34+ cells from a subject having sickle cell disease, the method comprising:
a) delivering a first RNP complex including a first gRNA and a Cpf1 RNA-guided nuclease or a modified Cpf1 RNA-guided nuclease to a first population of unmodified cells comprising a plurality of unmodified CD34+ cells from the subject to generate indels, the first gRNA including a first gRNA targeting domain, each modified CD34+ cell comprising an indel in an HBG gene promoter, 60% or more of the indels in the plurality of modified CD34+ cells as a whole are deletions of at least 4 base pairs; and
b) culturing the first population of RBCs from the first population of cells comprising the plurality of modified CD34+ cells,
the first population of RBCs exhibiting significantly decreased sickling upon deoxygenation than a second population of RBCs comprising a plurality of RBCs cultured from the first population of unmodified cells.

34. The method of decreasing sickling of claim 33, wherein the first population of RBCs sickle at a significantly lower oxygen tension than the second population of RBCs.

35. The method of decreasing sickling of claim 34, wherein the oxygen tension is measured by relative oxygen pressure.

36. The method of decreasing sickling of claim 33, wherein the first population of RBCs has a significantly higher minimum elongation index upon deoxygenation than the second population of RBCs.

37. The method of decreasing sickling of claim 33, wherein the first population of RBCs have a significantly higher velocity upon deoxygenation than a second population of RBCs comprising a plurality of RBCs cultured from the first population of unmodified cells.

38. The method of decreasing sickling of claim 33, wherein the first population of RBCs comprises higher HbF levels than a second population of RBCs comprising a plurality of RBCs cultured from the first population of unmodified cells.

39. The method of decreasing sickling of claim 33, wherein the first population of modified cells comprises a first population of modified cells comprising:
a plurality of modified CD34+ or hematopoietic stem cells,
one or more of the plurality of modified cells including one or more indels in an HBG gene promoter, the indels generated by delivering a first RNP complex including a first gRNA and a Cpf1 RNA-guided nuclease or a modified Cpf1 RNA-guided nuclease to a first population of unmodified cells comprising a plurality of unmodified CD34+ or hematopoietic stem cells, the first gRNA including a first gRNA targeting domain.

40. A method of alleviating one or more symptoms of sickle cell disease in a subject in need thereof comprising:
a) delivering a first RNP complex including a first gRNA and a Cpf1 RNA-guided nuclease or a modified Cpf1 RNA-guided nuclease to a first population of unmodified cells comprising a plurality of unmodified CD34+ or hematopoietic stem cells to generate indels, each modified CD34+ or hematopoietic stem comprising an indel in an HBG gene promoter, 60% or more of the indels in a plurality of the modified CD34+ or hematopoietic stem cells as a whole are deletions of at least 4 base pairs; and
b) administering a first population of modified cells comprising the plurality of modified CD34+ or hematopoietic stem cells to the subject to alleviate one or more symptoms of sickle cell disease.

41-44. (canceled)

45. The method of decreasing sickling of claim 33, wherein the first RNP complex is delivered to the first population of unmodified cells by electroporation.

46. The method of decreasing sickling of claim 33, wherein the second RNP complex is delivered to the second population of unmodified cells by electroporation.

47. The method of decreasing sickling of claim 33, wherein the first population of unmodified cells is from a subject having sickle cell disease.

48. The method of decreasing sickling of claim 33, the first gRNA including a 5′ end and a 3′ end, a DNA extension at the 5′ end, and a 2′-O-methyl-3′-phosphorothioate modification at the 3′ end.

49. The method of decreasing sickling of claim 33, wherein the DNA extension comprises a sequence set forth in SEQ ID NOs:1235-1250.

50. The method of decreasing sickling of claim 33, wherein the first gRNA targeting domain comprises SEQ ID NO:1254.

51. The method of decreasing sickling of claim 33, wherein the gRNA comprises SEQ ID NO:1051.

52. The method of decreasing sickling of claim 33, wherein the modified Cpf1 comprises SEQ ID NO:1097.

The application's sequence listing, which the Patent Office published only in electronic form, follows.

SEQUENCE LISTING (1276 sequences)

SEQ ID NO: 1 - protein, 1345 aa, Streptococcus mutans
  misc_feature (10)..(21): N-terminal RuvC-like domain
  misc_feature (759)..(766): RuvC-like domain
  misc_feature (837)..(863): HNH-like domain
  misc_feature (982)..(989): RuvC-like domain
MKKPYSIGLDIGTNSVGWAVVTDDYKVPAKKMKVLGNTDKSHIEKNLLGALLFDSGNTAEDRRLKRTARRRYTRRRNRILYLQEIFSEEMGKVDDSFFHRLEDSFLVTEDKRGERHPIFGNLEEEVKYHENFPTIYHLRQYLADNPEKVDLRLVYLALAHIIKFRGHFLIEGKFDTRNNDVQRLFQEFLAVYDNTFENSSLQEQNVQVEEILTDKISKSAKKDRVLKLFPNEKSNGRFAEFLKLIVGNQADFKKHFELEEKAPLQFSKDTYEEELEVLLAQIGDNYAELFLSAKKLYDSILLSGILTVTDVGTKAPLSASMIQRYNEHQMDLAQLKQFIRQKLSDKYNEVFSDVSKDGYAGYIDGKTNQEAFYKYLKGLLNKIEGSGYFLDKIEREDFLRKQRTFDNGSIPHQIHLQEMRAIIRRQAEFYPFLADNQDRIEKLLTFRIPYYVGPLARGKSDFAWLSRKSADKITPWNFDEIVDKESSAEAFINRMTNYDLYLPNQKVLPKHSLLYEKFTVYNELTKVKYKTEQGKTAFFDANMKQEIFDGVFKVYRKVTKDKLMDFLEKEFDEFRIVDLTGLDKENKVFNASYGTYHDLCKILDKDFLDNSKNEKILEDIVLTLTLFEDREMIRKRLENYSDLLTKEQVKKLERRHYTGWGRLSAELIHGIRNKESRKTILDYLIDDGNSNRNFMQLINDDALSFKEEIAKAQVIGETDNLNQVVSDIAGSPAIKKGILQSLKIVDELVKIMGHQPENIVVEMARENQFTNQGRRNSQQRLKGLTDSIKEFGSQILKEHPVENSQLQNDRLFLYYLQNGRDMYTGEELDIDYLSQYDIDHIIPQAFIKDNSIDNRVLTSSKENRGKSDDVPSKDVVRKMKSYWSKLLSAKLITQRKFDNLTKAERGGLTDDDKAGFIKRQLVETRQITKHVARILDERFNTETDENNKKIRQVKIVTLKSNLVSNFRKEFELYKVREINDYHHAHDAYLNAVIGKALLGVYPQLEPEFVYGDYPHFHGHKENKATAKKFFYSNIMNFFKKDDVRTDKNGEIIWKKDEHISNIKKVLSYPQVNIVKKVEEQTGGFSKESILPKGNSDKLIPRKTKKFYWDTKKYGGFDSPIVAYSILVIADIEKGKSKKLKTVKALVGVTIMEKMTFERDPVAFLERKGYRNVQEENIIKLPKYSLFKLENGRKRLLASARELQKGNEIVLPNHLGTLLYHAKNIHKVDEPKHLDYVDKHKDEFKELLDVVSNFSKKYTLAEGNLEKIKELYAQNNGEDLKELASSFINLLTFTAIGAPATFKFFDKNIDRKRYTSTTEILNATLIHQSITGLYETRIDLNKLGGD

SEQ ID NO: 2 - protein, 1368 aa, Streptococcus pyogenes [sequence omitted]

SEQ ID NO: 3 - DNA, 4107 bp, Streptococcus pyogenes
atggataaaaagtacagcatcgggctggacatcggtacaaactcagtggggtgggccgtgattacggacgagtacaaggtaccctccaaaaaatttaaagtgctgggtaacacggacagacactctataaagaaaaatcttattggagccttgctgttcgactcaggcgagacagccgaagccacaaggttgaagcggaccgccaggaggcggtataccaggagaaagaaccgcatatgctacctgcaagaaatcttcagtaacgagatggcaaaggttgacgatagctttttccatcgcctggaagaatcctttcttgttgaggaagacaagaagcacgaacggcaccccatctttggcaatattgtcgacgaagtggcatatcacgaaaagtacccgactatctaccacctcaggaagaagctggtggactctaccgataaggcggacctcagacttatttatttggcactcgcccacatgattaaatttagaggacatttcttgatcgagggcgacctgaacccggacaacagtgacgtcgataagctgttcatccaacttgtgcagacctacaatcaactgttcgaagaaaaccctataaatgcttcaggagtcgacgctaaagcaatcctgtccgcgcgcctctcaaaatctagaagacttgagaatctgattgctcagttgcccggggaaaagaaaaatggattgtttggcaacctgatcgccctcagtctcggactgaccccaaatttcaaaagtaacttcgacctggccgaagacgctaagctccagctgtccaaggacacatacgatgacgacctcgacaatctgctggcccagattggggatcagtacgccgatctctttttggcagcaaagaacctgtccgacgccatcctgttgagcgatatcttgagagtgaacaccgaaattactaaagcaccccttagcgcatctatgatcaagcggtacgacgagcatcatcaggatctgaccctgctgaaggctcttgtgaggcaacagctccccgaaaaatacaaggaaatcttctttgaccagagcaaaaacggctacgctggctatatagatggtggggccagtcaggaggaattctataaattcatcaagcccattctcgagaaaatggacggcacagaggagttgctggtcaaacttaacagggaggacctgctgcggaagcagcggacctttgacaacgggtctatcccccaccagattcatctgggcgaactgcacgcaatcctgaggaggcaggaggatttttatccttttcttaaagataaccgcgagaaaatagaaaagattcttacattcaggatcccgtactacgtgggacctctcgcccggggcaattcacggtttgcctggatgacaaggaagtcagaggagactattacaccttggaacttcgaagaagtggtggacaagggtgcatctgcccagtctttcatcgagcggatgacaaattttgacaagaacctccctaatgagaaggtgctgcccaaacattctctgctctacgagtactttaccgtctacaatgaactgactaaagtcaagtacgtcaccgagggaatgaggaagccggcattccttagtggagaacagaagaaggcgattgtagacctgttgttcaagaccaacaggaaggtgactgtgaagcaacttaaagaagactactttaagaagatcgaatgttttgacagtgtggaaatttcaggggttgaagaccgcttcaatgcgtcattggggacttaccatgatcttctcaagatcataaaggacaaagacttcctggacaacgaagaaaatgaggatattctcgaagacatcgtcctcaccctgaccctgttcgaagacagggaaatgatagaagagcgcttgaaaacctatgcccacctcttcgacgataaagttatgaagcagctgaagcgcaggagatacacaggatggggaagattgtcaaggaagctgatcaatggaattagggataaacagagtggcaagaccatactggatttcctcaaatctgatggcttcgccaataggaacttcatgcaactgattcacgatgactctcttaccttcaaggaggacattcaaaaggctcaggtgagcgggcagggagactcccttcatgaacacatcgcgaatttggcaggttcccccgctattaaaaagggcatccttcaaactgtcaaggtggtggatgaattggtcaaggtaatgggcagacataagccagaaaatattgtgatcgagatggcccgcgaaaaccagaccacacagaagggccagaaaaatagtagagagcggatgaagaggatcgaggagggcatcaaagagctgggatctcagattctcaaagaacaccccgtagaaaacacacagctgcagaacgaaaaattgtacttgtactatctgcagaacggcagagacatgtacgtcgaccaagaacttgatattaatagactgtccgactatgacgtagaccatatcgtgccccagtccttcctgaaggacgactccattgataacaaagtcttgacaagaagcgacaagaacaggggtaaaagtgataatgtgcctagcgaggaggtggtgaaaaaaatgaagaactactggcgacagctgcttaatgcaaagctcattacacaacggaagttcgataatctgacgaaagcagagagaggtggcttgtctgagttggacaaggcagggtttattaagcggcagctggtggaaactaggcagatcacaaagcacgtggcgcagattttggacagccggatgaacacaaaatacgacgaaaatgataaactgatacgagaggtcaaagttatcacgctgaaaagcaagctggtgtccgattttcggaaagacttccagttctacaaagttcgcgagattaataactaccatcatgctcacgatgcgtacctgaacgctgttgtcgggaccgccttgataaagaagtacccaaagctggaatccgagttcgtatacggggattacaaagtgtacgatgtgaggaaaatgatagccaagtccgagcaggagattggaaaggccacagctaagtacttcttttattctaacatcatgaatttttttaagacggaaattaccctggccaacggagagatcagaaagcggccccttatagagacaaatggtgaaacaggtgaaatcgtctgggataagggcagggatttcgctactgtgaggaaggtgctgagtatgccacaggtaaatatcgtgaaaaaaaccgaagtacagaccggaggattttccaaggaaagcattttgcctaaaagaaactcagacaagctcatcgcccgcaagaaagattgggaccctaagaaatacgggggatttgactcacccaccgtagcctattctgtgctggtggtagctaaggtggaaaaaggaaagtctaagaagctgaagtccgtgaaggaactcttgggaatcactatcatggaaagatcatcctttgaaaagaaccctatcgatttcctggaggctaagggttacaaggaggtcaagaaagacctcatcattaaactgccaaaatactctctcttcgagctggaaaatggcaggaagagaatgttggccagcgccggagagctgcaaaagggaaacgagcttgctctgccctccaaatatgttaattttctctatctcgcttcccactatgaaaagctgaaagggtctcccgaagataacgagcagaagcagctgttcgtcgaacagcacaagcactatctggatgaaataatcgaacaaataagcgagttcagcaaaagggttatcctggcggatgctaatttggacaaagtactgtctgcttataacaagcaccgggataagcctattagggaacaagccgagaatataattcacctctttacactcacgaatctcggagcccccgccgccttcaaatactttgatacgactatcgaccggaaacggtataccagtaccaaagaggtcctcgatgccaccctcatccaccagtcaattactggcctgtacgaaacacggatcgacctctctcaactgggcggcgactag

SEQ ID NO: 4 - protein, 1388 aa, Streptococcus thermophilus
  misc_feature (10)..(21): N-terminal RuvC-like domain
  misc_feature (760)..(767): RuvC-like domain
  misc_feature (844)..(870): HNH-like domain
  misc_feature (989)..(996): RuvC-like domain
MTKPYSIGLDIGTNSVGWAVTTDNYKVPSKKMKVLGNTSKKYIKKNLLGVLLFDSGITAEGRRLKRTARRRYTRRRNRILYLQEIFSTEMATLDDAFFQRLDDSFLVPDDKRDSKYPIFGNLVEEKAYHDEFPTIYHLRKYLADSTKKADLRLVYLALAHMIKYRGHFLIEGEFNSKNNDIQKNFQDFLDTYNAIFESDLSLENSKQLEEIVKDKISKLEKKDRILKLFPGEKNSGIFSEFLKLIVGNQADFRKCFNLDEKASLHFSKESYDEDLETLLGYIGDDYSDVFLKAKKLYDAILLSGFLTVTDNETEAPLSSAMIKRYNEHKEDLALLKEYIRNISLKTYNEVFKDDTKNGYAGYIDGKTNQEDFYVYLKKLLAEFEGADYFLEKIDREDFLRKQRTFDNGSIPYQIHLQEMRAILDKQAKFYPFLAKNKERIEKILTFRIPYYVGPLARGNSDFAWSIRKRNEKITPWNFEDVIDKESSAEAFINRMTSFDLYLPEEKVLPKHSLLYETFNVYNELTKVRFIAESMRDYQFLDSKQKKDIVRLYFKDKRKVTDKDIIEYLHAIYGYDGIELKGIEKQFNSSLSTYHDLLNIINDKEFLDDSSNEAIIEEIIHTLTIFEDREMIKQRLSKFENIFDKSVLKKLSRRHYTGWGKLSAKLINGIRDEKSGNTILDYLIDDGISNRNFMQLIHDDALSFKKKIQKAQIIGDEDKGNIKEVVKSLPGSPAIKKGILQSIKIVDELVKVMGGRKPESIVVEMARENQYTNQGKSNSQQRLKRLEKSLKELGSKILKENIPAKLSKIDNNALQNDRLYLYYLQNGKDMYTGDDLDIDRLSNYDIDHIIPQAFLKDNSIDNKVLVSSASNRGKSDDVPSLEVVKKRKTFWYQLLKSKLISQRKFDNLTKAERGGLSPEDKAGFIQRQLVETRQITKHVARLLDEKFNNKKDENNRAVRTVKIITLKSTLVSQFRKDFELYKVREINDFHHAHDAYLNAVVASALLKKYPKLEPEFVYGDYPKYNSFRERKSATEKVYFYSNIMNIFKKSISLADGRVIERPLIEVNEETGESVWNKESDLATVRRVLSYPQVNVVKKVEEQNHGLDRGKPKGLFNANLSSKPKPNSNENLVGAKEYLDPKKYGGYAGISNSFTVLVKGTIEKGAKKKITNVLEFQGISILDRINYRKDKLNFLLEKGYKDIELIIELPKYSLFELSDGSRRMLASILSTNNKRGEIHKGNQIFLSQKFVKLLYHAKRISNTINENHRKYVENHKKEFEELFYYILEFNENYVGAKKNGKLLNSAFQSWQNHSIDELCSSFIGPTGSERKGLFELTSRGSAADFEFLGVKIPRYRDYTPSSLLKDATLIHQSVTGLYETRIDLAKLGEG

SEQ ID NO: 5 - protein, 1334 aa, Listeria innocua
  misc_feature (10)..(21): N-terminal RuvC-like domain
  misc_feature (762)..(769): RuvC-like domain
  misc_feature (840)..(866): HNH-like domain
  misc_feature (985)..(992): RuvC-like domain
MKKPYTIGLDIGTNSVGWAVLTDQYDLVKRKMKIAGDSEKKQIKKNFWGVRLFDEGQTAADRRMARTARRRIERRRNRISYLQGIFAEEMSKTDANFFCRLSDSFYVDNEKRNSRHPFFATIEEEVEYHKNYPTIYHLREELVNSSEKADLRLVYLALAHIIKYRGNFLIEGALDTQNTSVDGIYKQFIQTYNQVFASGIEDGSLKKLEDNKDVAKILVEKVTRKEKLERILKLYPGEKSAGMFAQFISLIVGSKGNFQKPFDLIEKSDIECAKDSYEEDLESLLALIGDEYAELFVAAKNAYSAVVLSSIITVAETETNAKLSASMIERFDTHEEDLGELKAFIKLHLPKHYEEIFSNTEKHGYAGYIDGKTKQADFYKYMKMTLENIEGADYFIAKIEKENFLRKQRTFDNGAIPHQLHLEELEAILHQQAKYYPFLKENYDKIKSLVTFRIPYFVGPLANGQSEFAWLTRKADGEIRPWNIEEKVDFGKSAVDFIEKMTNKDTYLPKENVLPKHSLCYQKYLVYNELTKVRYINDQGKTSYFSGQEKEQIFNDLFKQKRKVKKKDLELFLRNMSHVESPTIEGLEDSFNSSYSTYHDLLKVGIKQEILDNPVNTEMLENIVKILTVFEDKRMIKEQLQQFSDVLDGVVLKKLERRHYTGWGRLSAKLLMGIRDKQSHLTILDYLMNDDGLNRNLMQLINDSNLSFKSIIEKEQVTTADKDIQSIVADLAGSPAIKKGILQSLKIVDELVSVMGYPPQTIVVEMARENQTTGKGKNNSRPRYKSLEKAIKEFGSQILKEHPTDNQELRNNRLYLYYLQNGKDMYTGQDLDIHNLSNYDIDHIVPQSFITDNSIDNLVLTSSAGNREKGDDVPPLEIVRKRKVFWEKLYQGNLMSKRKFDYLTKAERGGLTEADKARFIHRQLVETRQITKNVANILHQRFNYEKDDHGNTMKQVRIVTLKSALVSQFRKQFQLYKVRDVNDYHHAHDAYLNGVVANTLLKVYPQLEPEFVYGDYHQFDWFKANKATAKKQFYTNIMLFFAQKDRIIDENGEILWDKKYLDTVKKVMSYRQMNIVKKTEIQKGEFSKATIKPKGNSSKLIPRKTNWDPMKYGGLDSPNMAYAVVIEYAKGKNKLVFEKKIIRVTIMERKAFEKDEKAFLEEQGYRQPKVLAKLPKYTLYECEEGRRRMLASANEAQKGNQQVLPNHLVTLLHHAANCEVSDGKSLDYIESNREMFAELLAHVSEFAKRYTLAEANLNKINQLFEQNKEGDIKAIAQSFVDLMAFNAMGAPASFKFFETTIERKRYNNLKELLNSTIIYQSITGLYESRKRLDD

SEQ ID NO: 6 - protein, 1053 aa, Staphylococcus aureus
MKRNYILGLDIGITSVGYGIIDYETRDVIDAGVRLFKEANVENNEGRRSKRGARRLKRRRRHRIQRVKKLLFDYNLLTDHSELSGINPYEARVKGLSQKLSEEEFSAALLHLAKRRGVHNVNEVEEDTGNELSTKEQISRNSKALEEKYVAELQLERLKKDGEVRGSINRFKTSDYVKEAKQLLKVQKAYHQLDQSFIDTYIDLLETRRTYYEGPGEGSPFGWKDIKEWYEMLMGHCTYFPEELRSVKYAYNADLYNALNDLNNLVITRDENEKLEYYEKFQIIENVFKQKKKPTLKQIAKEILVNEEDIKGYRVTSTGKPEFTNLKVYHDIKDITARKEIIENAELLDQIAKILTIYQSSEDIQEELTNLNSELTQEEIEQISNLKGYTGTHNLSLKAINLILDELWHTNDNQIAIFNRLKLVPKKVDLSQQKEIPTTLVDDFILSPVVKRSFIQSIKVINAIIKKYGLPNDIIIELAREKNSKDAQKMINEMQKRNRQTNERIEEIIRTTGKENAKYLIEKIKLHDMQEGKCLYSLEAIPLEDLLNNPFNYEVDHIIPRSVSFDNSFNNKVLVKQEENSKKGNRTPFQYLSSSDSKISYETFKKHILNLAKGKGRISKTKKEYLLEERDINRFSVQKDFINRNLVDTRYATRGLMNLLRSYFRVNNLDVKVKSINGGFTSFLRRKWKFKKERNKGYKHHAEDALIIANADFIFKEWKKLDKAKKVMENQMFEEKQAESMPEIETEQEYKEIFITPHQIKHIKDFKDYKYSHRVDKKPNRELINDTLYSTRKDDKGNTLIVNNLNGLYDKDNDKLKKLINKSPEKLLMYHHDPQTYQKLKLIMEQYGDEKNPLYKYYEETGNYLTKYSKKDNGPVIKKIKYYGNKLNAHLDITDDYPNSRNKVVKLSLKPYRFDVYLDNGVYKFVTVKNLDVIKKENYYEVNSKCYEEAKKLKKISNQAEFIASFYNNDLIKINGELYRVIGVNNDLLNRIEVNMIDITYREYLENMNDKRPPRIIKTIASKTQSIKKYSTDILGNLYEVKSKKHPQIIKKG

SEQ ID NO: 7 - DNA, 3159 bp, Staphylococcus aureus
atgaaaaggaactacattctggggctggacatcgggattacaagcgtggggtatgggattattgactatgaaacaagggacgtgatcgacgcaggcgtcagactgttcaaggaggccaacgtggaaaacaatgagggacggagaagcaagaggggagccaggcgcctgaaacgacggagaaggcacagaatccagagggtgaagaaactgctgttcgattacaacctgctgaccgaccattctgagctgagtggaattaatccttatgaagccagggtgaaaggcctgagtcagaagctgtcagaggaagagttttccgcagctctgctgcacctggctaagcgccgaggagtgcataacgtcaatgaggtggaagaggacaccggcaacgagctgtctacaaaggaacagatctcacgcaatagcaaagctctggaagagaagtatgtcgcagagctgcagctggaacggctgaagaaagatggcgaggtgagagggtcaattaataggttcaagacaagcgactacgtcaaagaagccaagcagctgctgaaagtgcagaaggcttaccaccagctggatcagagcttcatcgatacttatatcgacctgctggagactcggagaacctactatgagggaccaggagaagggagccccttcggatggaaagacatcaaggaatggtacgagatgctgatgggacattgcacctattttccagaagagctgagaagcgtcaagtacgcttataacgcagatctgtacaacgccctgaatgacctgaacaacctggtcatcaccagggatgaaaacgagaaactggaatactatgagaagttccagatcatcgaaaacgtgtttaagcagaagaaaaagcctacactgaaacagattgctaaggagatcctggtcaacgaagaggacatcaagggctaccgggtgacaagcactggaaaaccagagttcaccaatctgaaagtgtatcacgatattaaggacatcacagcacggaaagaaatcattgagaacgccgaactgctggatcagattgctaagatcctgactatctaccagagctccgaggacatccaggaagagctgactaacctgaacagcgagctgacccaggaagagatcgaacagattagtaatctgaaggggtacaccggaacacacaacctgtccctgaaagctatcaatctgattctggatgagctgtggcatacaaacgacaatcagattgcaatctttaaccggctgaagctggtcccaaaaaaggtggacctgagtcagcagaaagagatcccaaccacactggtggacgatttcattctgtcacccgtggtcaagcggagcttcatccagagcatcaaagtgatcaacgccatcatcaagaagtacggcctgcccaatgatatcattatcgagctggctagggagaagaacagcaaggacgcacagaagatgatcaatgagatgcagaaacgaaaccggcagaccaatgaacgcattgaagagattatccgaactaccgggaaagagaacgcaaagtacctgattgaaaaaatcaagctgcacgatatgcaggagggaaagtgtctgtattctctggaggccatccccctggaggacctgctgaacaatccattcaactacgaggtcgatcatattatccccagaagcgtgtccttcgacaattcctttaacaacaaggtgctggtcaagcaggaagagaactctaaaaagggcaataggactcctttccagtacctgtctagttcagattccaagatctcttacgaaacctttaaaaagcacattctgaatctggccaaaggaaagggccgcatcagcaagaccaaaaaggagtacctgctggaagagcgggacatcaacagattctccgtccagaaggattttattaaccggaatctggtggacacaagatacgctactcgcggcctgatgaatctgctgcgatcctatttccgggtgaacaatctggatgtgaaagtcaagtccatcaacggcgggttcacatcttttctgaggcgcaaatggaagtttaaaaaggagcgcaacaaagggtacaagcaccatgccgaagatgctctgattatcgcaaatgccgacttcatctttaaggagtggaaaaagctggacaaagccaagaaagtgatggagaaccagatgttcgaagagaagcaggccgaatctatgcccgaaatcgagacagaacaggagtacaaggagattttcatcactcctcaccagatcaagcatatcaaggatttcaaggactacaagtactctcaccgggtggataaaaagcccaacagagagctgatcaatgacaccctgtatagtacaagaaaagacgataaggggaataccctgattgtgaacaatctgaacggactgtacgacaaagataatgacaagctgaaaaagctgatcaacaaaagtcccgagaagctgctgatgtaccaccatgatcctcagacatatcagaaactgaagctgattatggagcagtacggcgacgagaagaacccactgtataagtactatgaagagactgggaactacctgaccaagtatagcaaaaaggataatggccccgtgatcaagaagatcaagtactatgggaacaagctgaatgcccatctggacatcacagacgattaccctaacagtcgcaacaaggtggtcaagctgtcactgaagccatacagattcgatgtctatctggacaacggcgtgtataaatttgtgactgtcaagaatctggatgtcatcaaaaaggagaactactatgaagtgaatagcaagtgctacgaagaggctaaaaagctgaaaaagattagcaaccaggcagagttcatcgcctccttttacaacaacgacctgattaagatcaatggcgaactgtatagggtcatcggggtgaacaatgatctgctgaaccgcattgaagtgaatatgattgacatcacttaccgagagtatctggaaaacatgaatgataagcgcccccctcgaattatcaaaacaattgcctctaagactcagagtatcaaaaagtactcaaccgacattctgggaaacctgtatgaggtgaagagcaaaaagcaccctcagattatcaaaaagggc

SEQ ID NO: 8 - DNA, 3159 bp, Staphylococcus aureus
atgaagcggaactacatcctgggcctggacatcggcatcaccagcgtgggctacggcatcatcgactacgagacacgggacgtgatcgatgccggcgtgcggctgttcaaagaggccaacgtggaaaacaacgagggcaggcggagcaagagaggcgccagaaggctgaagcggcggaggcggcatagaatccagagagtgaagaagctgctgttcgactacaacctgctgaccgaccacagcgagctgagcggcatcaacccctacgaggccagagtgaagggcctgagccagaagctgagcgaggaagagttctctgccgccctgctgcacctggccaagagaagaggcgtgcacaacgtgaacgaggtggaagaggacaccggcaacgagctgtccaccaaagagcagatcagccggaacagcaaggccctggaagagaaatacgtggccgaactgcagctggaacggctgaagaaagacggcgaagtgcggggcagcatcaacagattcaagaccagcgactacgtgaaagaagccaaacagctgctgaaggtgcagaaggcctaccaccagctggaccagagcttcatcgacacctacatcgacctgctggaaacccggcggacctactatgagggacctggcgagggcagccccttcggctggaaggacatcaaagaatggtacgagatgctgatgggccactgcacctacttccccgaggaactgcggagcgtgaagtacgcctacaacgccgacctgtacaacgccctgaacgacctgaacaatctcgtgatcaccagggacgagaacgagaagctggaatattacgagaagttccagatcatcgagaacgtgttcaagcagaagaagaagcccaccctgaagcagatcgccaaagaaatcctcgtgaacgaagaggatattaagggctacagagtgaccagcaccggcaagcccgagttcaccaacctgaaggtgtaccacgacatcaaggacattaccgcccggaaagagattattgagaacgccgagctgctggatcagattgccaagatcctgaccatctaccagagcagcgaggacatccaggaagaactgaccaatctgaactccgagctgacccaggaagagatcgagcagatctctaatctgaagggctataccggcacccacaacctgagcctgaaggccatcaacctgatcctggacgagctgtggcacaccaacgacaaccagatcgctatcttcaaccggctgaagctggtgcccaagaaggtggacctgtcccagcagaaagagatccccaccaccctggtggacgacttcatcctgagccccgtcgtgaagagaagcttcatccagagcatcaaagtgatcaacgccatcatcaagaagtacggcctgcccaacgacatcattatcgagctggcccgcgagaagaactccaaggacgcccagaaaatgatcaacgagatgcagaagcggaaccggcagaccaacgagcggatcgaggaaatcatccggaccaccggcaaagagaacgccaagtacctgatcgagaagatcaagctgcacgacatgcaggaaggcaagtgcctgtacagcctggaagccatccctctggaagatctgctgaacaaccccttcaactatgaggtggaccacatcatccccagaagcgtgtccttcgacaacagcttcaacaacaaggtgctcgtgaagcaggaagaaaacagcaagaagggcaaccggaccccattccagtacctgagcagcagcgacagcaagatcagctacgaaaccttcaagaagcacatcctgaatctggccaagggcaagggcagaatcagcaagaccaagaaagagtatctgctggaagaacgggacatcaacaggttctccgtgcagaaagacttcatcaaccggaacctggtggataccagatacgccaccagaggcctgatgaacctgctgcggagctacttcagagtgaacaacctggacgtgaaagtgaagtccatcaatggcggcttcaccagctttctgcggcggaagtggaagtttaagaaagagcggaacaaggggtacaagcaccacgccgaggacgccctgatcattgccaacgccgatttcatcttcaaagagtggaagaaactggacaaggccaaaaaagtgatggaaaaccagatgttcgaggaaaagcaggccgagagcatgcccgagatcgaaaccgagcaggagtacaaagagatcttcatcaccccccaccagatcaagcacattaaggacttcaaggactacaagtacagccaccgggtggacaagaagcctaatagagagctgattaacgacaccctgtactccacccggaaggacgacaagggcaacaccctgatcgtgaacaatctgaacggcctgtacgacaaggacaatgacaagctgaaaaagctgatcaacaagagccccgaaaagctgctgatgtaccaccacgacccccagacctaccagaaactgaagctgattatggaacagtacggcgacgagaagaatcccctgtacaagtactacgaggaaaccgggaactacctgaccaagtactccaaaaaggacaacggccccgtgatcaagaagattaagtattacggcaacaaactgaacgcccatctggacatcaccgacgactaccccaacagcagaaacaaggtcgtgaagctgtccctgaagccctacagattcgacgtgtacctggacaatggcgtgtacaagttcgtgaccgtgaagaatctggatgtgatcaaaaaagaaaactactacgaagtgaatagcaagtgctatgaggaagctaagaagctgaagaagatcagcaaccaggccgagtttatcgcctccttctacaacaacgatctgatcaagatcaacggcgagctgtatagagtgatcggcgtgaacaacgacctgctgaaccggatcgaagtgaacatgatcgacatcacctaccgcgagtacctggaaaacatgaacgacaagaggccccccaggatcattaagacaatcgcctccaagacccagagcattaagaagtacagcacagacattctgggcaacctgtatgaagtgaaatctaagaagcaccctcagatcatcaaaaagggc

SEQ ID NO: 9 - DNA, 3159 bp, Staphylococcus aureus
atgaagcgcaactacatcctcggactggacatcggcattacctccgtgggatacggcatcatcgattacgaaactagggatgtgatcgacgctggagtcaggctgttcaaagaggcgaacgtggagaacaacgaggggcggcgctcaaagaggggggcccgccggctgaagcgccgccgcagacatagaatccagcgcgtgaagaagctgctgttcgactacaaccttctgaccgaccactccgaactttccggcatcaacccatatgaggctagagtgaagggattgtcccaaaagctgtccgaggaagagttctccgccgcgttgctccacctcgccaagcgcaggggagtgcacaatgtgaacgaagtggaagaagataccggaaacgagctgtccaccaaggagcagatcagccggaactccaaggccctggaagagaaatacgtggcggaactgcaactggagcggctgaagaaagacggagaagtgcgcggctcgatcaaccgcttcaagacctcggactacgtgaaggaggccaagcagctcctgaaagtgcaaaaggcctatcaccaacttgaccagtcctttatcgatacctacatcgatctgctcgagactcggcggacttactacgagggtccaggggagggctccccatttggttggaaggatattaaggagtggtacgaaatgctgatgggacactgcacatacttccctgaggagctgcggagcgtgaaatacgcatacaacgcagacctgtacaacgcgctgaacgacctgaacaatctcgtgatcacccgggacgagaacgaaaagctcgagtattacgaaaagttccagattattgagaacgtgttcaaacagaagaagaagccgacactgaagcagattgccaaggaaatcctcgtgaacgaagaggacatcaagggctatcgagtgacctcaacgggaaagccggagttcaccaatctgaaggtctaccacgacatcaaagacattaccgcccggaaggagatcattgagaacgcggagctgttggaccagattgcgaagattctgaccatctaccaatcctccgaggatattcaggaagaactcaccaacctcaacagcgaactgacccaggaggagatagagcaaatctccaacctgaagggctacaccggaactcataacctgagcctgaaggccatcaacttgatcctggacgagctgtggcacaccaacgataaccagatcgctattttcaatcggctgaagctggtccccaagaaagtggacctctcacaacaaaaggagatccctactacccttgtggacgatttcattctgtcccccgtggtcaagagaagcttcatacagtcaatcaaagtgatcaatgccattatcaagaaatacggtctgcccaacgacattatcattgagctcgcccgcgagaagaactcgaaggacgcccagaagatgattaacgaaatgcagaagaggaaccgacagactaacgaacggatcgaagaaatcatccggaccaccgggaaggaaaacgcgaagtacctgatcgaaaagatcaagctccatgacatgcaggaaggaaagtgtctgtactcgctggaggccattccgctggaggacttgctgaacaacccttttaactacgaagtggatcatatcattccgaggagcgtgtcattcgacaattccttcaacaacaaggtcctcgtgaagcaggaggaaaactcgaagaagggaaaccgcacgccgttccagtacctgagcagcagcgactccaagatttcctacgaaaccttcaagaagcacatcctcaacctggcaaaggggaagggtcgcatctccaagaccaagaaggaatatctgctggaagaaagagacatcaacagattctccgtgcaaaaggacttcatcaaccgcaacctcgtggatactagatacgctactcggggtctgatgaacctcctgagaagctactttagagtgaacaatctggacgtgaaggtcaagtcgattaacggaggtttcacctccttcctgcggcgcaagtggaagttcaagaaggaacggaacaagggctacaagcaccacgccgaggacgccctgatcattgccaacgccgacttcatcttcaaagaatggaagaaacttgacaaggctaagaaggtcatggaaaaccagatgttcgaagaaaagcaggccgagtctatgcctgaaatcgagactgaacaggagtacaaggaaatctttattacgccacaccagatcaaacacatcaaggatttcaaggattacaagtactcacatcgcgtggacaaaaagccgaacagggaactgatcaacgacaccctctactccacccggaaggatgacaaagggaataccctcatcgtcaacaaccttaacggcctgtacgacaaggacaacgataagctgaagaagctcattaacaagtcgcccgaaaagttgctgatgtaccaccacgaccctcagacttaccagaagctcaagctgatcatggagcagtatggggacgagaaaaacccgttgtacaagtactacgaagaaactgggaattatctgactaagtactccaagaaagataacggccccgtgattaagaagattaagtactacggcaacaagctgaacgcccatctggacatcaccgatgactaccctaattcccgcaacaaggtcgtcaagctgagcctcaagccctaccggtttgatgtgtaccttgacaatggagtgtacaagttcgtgactgtgaagaaccttgacgtgatcaagaaggagaactactacgaagtcaactccaagtgctacgaggaagcaaagaagttgaagaagatctcgaaccaggccgagttcattgcctccttctataacaacgacctgattaagatcaacggcgaactgtaccgcgtcattggcgtgaacaacgatctcctgaaccgcatcgaagtgaacatgatcgacatcacttaccgggaatacctggagaatatgaacgacaagcgcccgccccggatcattaagactatcgcctcaaagacccagtcgatcaagaagtacagcaccgacatcctgggcaacctgtacgaggtcaaatcgaagaagcacccccagatcatcaagaaggga

SEQ ID NO: 10 - DNA, 3159 bp, Staphylococcus aureus
atgaaaaggaactacattctggggctggccatcgggattacaagcgtggggtatgggattattgactatgaaacaagggacgtgatcgacgcaggcgtcagactgttcaaggaggccaacgtggaaaacaatgagggacggagaagcaagaggggagccaggcgcctgaaacgacggagaaggcacagaatccagagggtgaagaaactgctgttcgattacaacctgctgaccgaccattctgagctgagtggaattaatccttatgaagccagggtgaaaggcctgagtcagaagctgtcagaggaagagttttccgcagctctgctgcacctggctaagcgccgaggagtgcataacgtcaatgaggtggaagaggacaccggcaacgagctgtctacaaaggaacagatctcacgcaatagcaaagctctggaagagaagtatgtcgcagagctgcagctggaacggctgaagaaagatggcgaggtgagagggtcaattaataggttcaagacaagcgactacgtcaaagaagccaagcagctgctgaaagtgcagaaggcttaccaccagctggatcagagcttcatcgatacttatatcgacctgctggagactcggagaacctactatgagggaccaggagaagggagccccttcggatggaaagacatcaaggaatggtacgagatgctgatgggacattgcacctattttccagaagagctgagaagcgtcaagtacgcttataacgcagatctgtacaacgccctgaatgacctgaacaacctggtcatcaccagggatgaaaacgagaaactggaatactatgagaagttccagatcatcgaaaacgtgtttaagcagaagaaaaagcctacactgaaacagattgctaaggagatcctggtcaacgaagaggacatcaagggctaccgggtgacaagcactggaaaaccagagttcaccaatctgaaagtgtatcacgatattaaggacatcacagcacggaaagaaatcattgagaacgccgaactgctggatcagattgctaagatcctgactatctaccagagctccgaggacatccaggaagagctgactaacctgaacagcgagctgacccaggaagagatcgaacagattagtaatctgaaggggtacaccggaacacacaacctgtccctgaaagctatcaatctgattctggatgagctgtggcatacaaacgacaatcagattgcaatctttaaccggctgaagctggtcccaaaaaaggtggacctgagtcagcagaaagagatcccaaccacactggtggacgatttcattctgtcacccgtggtcaagcggagcttcatccagagcatcaaagtgatcaacgccatcatcaagaagtacggcctgcccaatgatatcattatcgagctggctagggagaagaacagcaaggacgcacagaagatgatcaatgagatgcagaaacgaaaccggcagaccaatgaacgcattgaagagattatccgaactaccgggaaagagaacgcaaagtacctgattgaaaaaatcaagctgcacgatatgcaggagggaaagtgtctgtattctctggaggccatccccctggaggacctgctgaacaatccattcaactacgaggtcgatcatattatccccagaagcgtgtccttcgacaattcctttaacaacaaggtgctggtcaagcaggaagagaactctaaaaagggcaataggactcctttccagtacctgtctagttcagattccaagatctcttacgaaacctttaaaaagcacattctgaatctggccaaaggaaagggccgcatcagcaagaccaaaaaggagtacctgctggaagagcgggacatcaacagattctccgtccagaaggattttattaaccggaatctggtggacacaagatacgctactcgcggcctgatgaatctgctgcgatcctatttccgggtgaacaatctggatgtgaaagtcaagtccatcaacggcgggttcacatcttttctgaggcgcaaatggaagtttaaaaaggagcgcaacaaagggtacaagcaccatgccgaagatgctctgattatcgcaaatgccgacttcatctttaaggagtggaaaaagctggacaaagccaagaaagtgatggagaaccagatgttcgaagagaagcaggccgaatctatgcccgaaatcgagacagaacaggagtacaaggagattttcatcactcctcaccagatcaagcatatcaaggatttcaaggactacaagtactctcaccgggtggataaaaagcccaacagagagctgatcaatgacaccctgtatagtacaagaaaagacgataaggggaataccctgattgtgaacaatctgaacggactgtacgacaaagataatgacaagctgaaaaagctgatcaacaaaagtcccgagaagctgctgatgtaccaccatgatcctcagacatatcagaaactgaagctgattatggagcagtacggcgacgagaagaacccactgtataagtactatgaagagactgggaactacctgaccaagtatagcaaaaaggataatggccccgtgatcaagaagatcaagtactatgggaacaagctgaatgcccatctggacatcacagacgattaccctaacagtcgcaacaaggtggtcaagctgtcactgaagccatacagattcgatgtctatctggacaacggcgtgtataaatttgtgactgtcaagaatctggatgtcatcaaaaaggagaactactatgaagtgaatagcaagtgctacgaagaggctaaaaagctgaaaaagattagcaaccaggcagagttcatcgcctccttttacaacaacgacctgattaagatcaatggcgaactgtatagggtcatcggggtgaacaatgatctgctgaaccgcattgaagtgaatatgattgacatcacttaccgagagtatctggaaaacatgaatgataagcgcccccctcgaattatcaaaacaattgcctctaagactcagagtatcaaaaagtactcaaccgacattctgggaaacctgtatgaggtgaagagcaaaaagcaccctcagattatcaaaaagggc

SEQ ID NO: 11 - DNA, 3159 bp, Staphylococcus aureus
atgaaaaggaactacattctggggctggacatcgggattacaagcgtggggtatgggattattgactatgaaacaagggacgtgatcgacgcaggcgtcagactgttcaaggaggccaacgtggaaaacaatgagggacggagaagcaagaggggagccaggcgcctgaaacgacggagaaggcacagaatccagagggtgaagaaactgctgttcgattacaacctgctgaccgaccattctgagctgagtggaattaatccttatgaagccagggtgaaaggcctgagtcagaagctgtcagaggaagagttttccgcagctctgctgcacctggctaagcgccgaggagtgcataacgtcaatgaggtggaagaggacaccggcaacgagctgtctacaaaggaacagatctcacgcaatagcaaagctctggaagagaagtatgtcgcagagctgcagctggaacggctgaagaaagatggcgaggtgagagggtcaattaataggttcaagacaagcgactacgtcaaagaagccaagcagctgctgaaagtgcagaaggcttaccaccagctggatcagagcttcatcgatacttatatcgacctgctggagactcggagaacctactatgagggaccaggagaagggagccccttcggatggaaagacatcaaggaatggtacgagatgctgatgggacattgcacctattttccagaagagctgagaagcgtcaagtacgcttataacgcagatctgtacaacgccctgaatgacctgaacaacctggtcatcaccagggatgaaaacgagaaactggaatactatgagaagttccagatcatcgaaaacgtgtttaagcagaagaaaaagcctacactgaaacagattgctaaggagatcctggtcaacgaagaggacatcaagggctaccgggtgacaagcactggaaaaccagagttcaccaatctgaaagtgtatcacgatattaaggacatcacagcacggaaagaaatcattgagaacgccgaactgctggatcagattgctaagatcctgactatctaccagagctccgaggacatccaggaagagctgactaacctgaacagcgagctgacccaggaagagatcgaacagattagtaatctgaaggggtacaccggaacacacaacctgtccctgaaagctatcaatctgattctggatgagctgtggcatacaaacgacaatcagattgcaatctttaaccggctgaagctggtcccaaaaaaggtggacctgagtcagcagaaagagatcccaaccacactggtggacgatttcattctgtcacccgtggtcaagcggagcttcatccagagcatcaaagtgatcaacgccatcatcaagaagtacggcctgcccaatgatatcattatcgagctggctagggagaagaacagcaaggacgcacagaagatgatcaatgagatgcagaaacgaaaccggcagaccaatgaacgcattgaagagattatccgaactaccgggaaagagaacgcaaagtacctgattgaaaaaatcaagctgcacgatatgcaggagggaaagtgtctgtattctctggaggccatccccctggaggacctgctgaacaatccattcaactacgaggtcgatcatattatccccagaagcgtgtccttcgacaattcctttaacaacaaggtgctggtcaagcaggaagaggcctctaaaaagggcaataggactcctttccagtacctgtctagttcagattccaagatctcttacgaaacctttaaaaagcacattctgaatctggccaaaggaaagggccgcatcagcaagaccaaaaaggagtacctgctggaagagcgggacatcaacagattctccgtccagaaggattttattaaccggaatctggtggacacaagatacgctactcgcggcctgatgaatctgctgcgatcctatttccgggtgaacaatctggatgtgaaagtcaagtccatcaacggcgggttcacatcttttctgaggcgcaaatggaagtttaaaaaggagcgcaacaaagggtacaagcaccatgccgaagatgctctgattatcgcaaatgccgacttcatctttaaggagtggaaaaagctggacaaagccaagaaagtgatggagaaccagatgttcgaagagaagcaggccgaatctatgcccgaaatcgagacagaacaggagtacaaggagattttcatcactcctcaccagatcaagcatatcaaggatttcaaggactacaagtactctcaccgggtggataaaaagcccaacagagagctgatcaatgacaccctgtatagtacaagaaaagacgataaggggaataccctgattgtgaacaatctgaacggactgtacgacaaagataatgacaagctgaaaaagctgatcaacaaaagtcccgagaagctgctgatgtaccaccatgatcctcagacatatcagaaactgaagctgattatggagcagtacggcgacgagaagaacccactgtataagtactatgaagagactgggaactacctgaccaagtatagcaaaaaggataatggccccgtgatcaagaagatcaagtactatgggaacaagctgaatgcccatctggacatcacagacgattaccctaacagtcgcaacaaggtggtcaagctgtcactgaagccatacagattcgatgtctatctggacaacggcgtgtataaatttgtgactgtcaagaatctggatgtcatcaaaaaggagaactactatgaagtgaatagcaagtgctacgaagaggctaaaaagctgaaaaagattagcaaccaggcagagttcatcgcctccttttacaacaacgacctgattaagatcaatggcgaactgtatagggtcatcggggtgaacaatgatctgctgaaccgcattgaagtgaatatgattgacatcacttaccgagagtatctggaaaacatgaatgataagcgcccccctcgaattatcaaaacaattgcctctaagactcagagtatcaaaaagtactcaaccgacattctgggaaacctgtatgaggtgaagagcaaaaagcaccctcagattatcaaaaagggc

SEQ ID NO: 12 - protein, 1082 aa, Neisseria meningitidis
MAAFKPNPINYILGLDIGIASVGWAMVEIDEDENPICLIDLGVRVFERAEVPKTGDSLAMARRLARSVRRLTRRRAHRLLRARRLLKREGVLQAADFDENGLIKSLPNTPWQLRAAALDRKLTPLEWSAVLLHLIKHRGYLSQRKNEGETADKELGALLKGVADNAHALQTGDFRTPAELALNKFEKESGHIRNQRGDYSHTFSRKDLQAELILLFEKQKEFGNPHVSGGLKEGIETLLMTQRPALSGDAVQKMLGHCTFEPAEPKAAKNTYTAERFIWLTKLNNLRILEQGSERPLTDTERATLMDEPYRKSKLTYAQARKLLGLEDTAFFKGLRYGKDNAEASTLMEMKAYHAISRALEKEGLKDKKSPLNLSPELQDEIGTAFSLFKTDEDITGRLKDRIQPEILEALLKHISFDKFVQISLKALRRIVPLMEQGKRYDEACAEIYGDHYGKKNTEEKIYLPPIPADEIRNPVVLRALSQARKVINGVVRRYGSPARIHIETAREVGKSFKDRKEIEKRQEENRKDREKAAAKFREYFPNFVGEPKSKDILKLRLYEQQHGKCLYSGKEINLGRLNEKGYVEIDHALPFSRTWDDSFNNKVLVLGSENQNKGNQTPYEYFNGKDNSREWQEFKARVETSRFPRSKKQRILLQKFDEDGFKERNLNDTRYVNRFLCQFVADRMRLTGKGKKRVFASNGQITNLLRGFWGLRKVRAENDRHHALDAVVVACSTVAMQQKITRFVRYKEMNAFDGKTIDKETGEVLHQKTHFPQPWEFFAQEVMIRVFGKPDGKPEFEEADTPEKLRTLLAEKLSSRPEAVHEYVTPLFVSRAPNRKMSGQGHMETVKSAKRLDEGVSVLRVPLTQLKLKDLEKMVNREREPKLYEALKARLEAHKDDPAKAFAEPFYKYDKAGNRTQQVKAVRVEQVQKTGVWVRNHNGIADNATMVRVDVFEKGDKYYLVPIYSWQVAKGILPDRAVVQGKDEEDWQLIDDSFNFKFSLHPNDLVEVITKKARMFGYFASCHRGTGNINIRIHDLDHKIGKNGILEGIGVKTALSFQKYQIDELGKEIRPCRLKKRPPVR

SEQ ID NO: 13 - DNA, 3249 bp, Neisseria meningitidis
  misc_feature (1)..(3249): Exemplary codon optimized Cas9
atggccgccttcaagcccaaccccatcaactacatcctgggcctggacatcggcatcgccagcgtgggctgggccatggtggagatcgacgaggacgagaaccccatctgcctgatcgacctgggtgtgcgcgtgttcgagcgcgctgaggtgcccaagactggtgacagtctggctatggctcgccggcttgctcgctctgttcggcgccttactcgccggcgcgctcaccgccttctgcgcgctcgccgcctgctgaagcgcgagggtgtgctgcaggctgccgacttcgacgagaacggcctgatcaagagcctgcccaacactccttggcagctgcgcgctgccgctctggaccgcaagctgactcctctggagtggagcgccgtgctgctgcacctgatcaagcaccgcggctacctgagccagcgcaagaacgagggcgagaccgccgacaaggagctgggtgctctgctgaagggcgtggccgacaacgcccacgccctgcagactggtgacttccgcactcctgctgagctggccctgaacaagttcgagaaggagagcggccacatccgcaaccagcgcggcgactacagccacaccttcagccgcaaggacctgcaggccgagctgatcctgctgttcgagaagcagaaggagttcggcaacccccacgtgagcggcggcctgaaggagggcatcgagaccctgctgatgacccagcgccccgccctgagcggcgacgccgtgcagaagatgctgggccactgcaccttcgagccagccgagcccaaggccgccaagaacacctacaccgccgagcgcttcatctggctgaccaagctgaacaacctgcgcatcctggagcagggcagcgagcgccccctgaccgacaccgagcgcgccaccctgatggacgagccctaccgcaagagcaagctgacctacgcccaggcccgcaagctgctgggtctggaggacaccgccttcttcaagggcctgcgctacggcaaggacaacgccgaggccagcaccctgatggagatgaaggcctaccacgccatcagccgcgccctggagaaggagggcctgaaggacaagaagagtcctctgaacctgagccccgagctgcaggacgagatcggcaccgccttcagcctgttcaagaccgacgaggacatcaccggccgcctgaaggaccgcatccagcccgagatcctggaggccctgctgaagcacatcagcttcgacaagttcgtgcagatcagcctgaaggccctgcgccgcatcgtgcccctgatggagcagggcaagcgctacgacgaggcctgcgccgagatctacggcgaccactacggcaagaagaacaccgaggagaagatctacctgcctcctatccccgccgacgagatccgcaaccccgtggtgctgcgcgccctgagccaggcccgcaaggtgatcaacggcgtggtgcgccgctacggcagccccgcccgcatccacatcgagaccgcccgcgaggtgggcaagagcttcaaggaccgcaaggagatcgagaagcgccaggaggagaaccgcaaggaccgcgagaaggccgccgccaagttccgcgagtacttccccaacttcgtgggcgagcccaagagcaaggacatcctgaagctgcgcctgtacgagcagcagcacggcaagtgcctgtacagcggcaaggagatcaacctgggccgcctgaacgagaagggctacgtggagatcgaccacgccctgcccttcagccgcacctgggacgacagcttcaacaacaaggtgctggtgctgggcagcgagaaccagaacaagggcaaccagaccccctacgagtacttcaacggcaaggacaacagccgcgagtggcaggagttcaaggcccgcgtggagaccagccgcttcccccgcagcaagaagcagcgcatcctgctgcagaagttcgacgaggacggcttcaaggagcgcaacctgaacgacacccgctacgtgaaccgcttcctgtgccagttcgtggccgaccgcatgcgcctgaccggcaagggcaagaagcgcgtgttcgccagcaacggccagatcaccaacctgctgcgcggcttctggggcctgcgcaaggtgcgcgccgagaacgaccgccaccacgccctggacgccgtggtggtggcctgcagcaccgtggccatgcagcagaagatcacccgcttcgtgcgctacaaggagatgaacgccttcgacggtaaaaccatcgacaaggagaccggcgaggtgctgcaccagaagacccacttcccccagccctgggagttcttcgcccaggaggtgatgatccgcgtgttcggcaagcccgacggcaagcccgagttcgaggaggccgacacccccgagaagctgcgcaccctgctggccgagaagctgagcagccgccctgaggccgtgcacgagtacgtgactcctctgttcgtgagccgcgcccccaaccgcaagatgagcggtcagggtcacatggagaccgtgaagagcgccaagcgcctggacgagggcgtgagcgtgctgcgcgtgcccctgacccagctgaagctgaaggacctggagaagatggtgaaccgcgagcgcgagcccaagctgtacgaggccctgaaggcccgcctggaggcccacaaggacgaccccgccaaggccttcgccgagcccttctacaagtacgacaaggccggcaaccgcacccagcaggtgaaggccgtgcgcgtggagcaggtgcagaagaccggcgtgtgggtgcgcaaccacaacggcatcgccgacaacgccaccatggtgcgcgtggacgtgttcgagaagggcgacaagtactacctggtgcccatctacagctggcaggtggccaagggcatcctgcccgaccgcgccgtggtgcagggcaaggacgaggaggactggcagctgatcgacgacagcttcaacttcaagttcagcctgcaccccaacgacctggtggaggtgatcaccaagaaggcccgcatgttcggctacttcgccagctgccaccgcggcaccggcaacatcaacatccgcatccacgacctggaccacaagatcggcaagaacggcatcctggagggcatcggcgtgaagaccgccctgagcttccagaagtaccagatcgacgagctgggcaaggagatccgcccctgccgcctgaagaagcgccctcctgtgcgctaa

SEQ ID NO: 14 - protein, 859 aa, Artificial Sequence
  Synthetic Cas9 consensus sequence derived from Sm, Sp, St, and Li Cas9 sequences
  misc_feature (4)..(4): Xaa can be any naturally occurring amino acid
  misc_feature (8)..(18): N-terminal RuvC-like domain
  misc_feature (21)..(21): Xaa can be any naturally occurring amino acid
  misc_feature (23)..(23): Xaa can be any naturally occurring amino acid
  misc_feature (24)..(24): Xaa can be any naturally occurring amino acid
  misc_feature (26)..(26): Xaa can be any naturally occurring amino acid
  misc_feature (29)..(31): Each Xaa can independently be any naturally occurring amino acid
  misc_feature (33)..(33): Xaa can be any naturally occurring amino acid
  misc_feature (36)..(36): Xaa can be any naturally occurring amino acid
  misc_feature (45)..(45): Xaa can be any naturally occurring amino acid
  misc_feature (54)..(54): Xaa can be any naturally occurring amino acid
  misc_feature (63)..(63): Xaa can be any naturally occurring amino acid
  misc_feature (71)..(71): Xaa can be any naturally occurring amino acid
  misc_feature (75)..(75): Xaa can be any naturally occurring amino acid
  misc_feature (76)..(76): Xaa can be any naturally occurring amino acid
  misc_feature (78)..(80): Each Xaa can independently be any naturally occurring amino acid
  misc_feature (82)..(82): Xaa can be any naturally occurring amino acid
  misc_feature (84)..(84): Xaa can be any naturally occurring amino acid
  misc_feature (85)..(85): Xaa can be any naturally occurring amino acid
  misc_feature (89)..(89): Xaa can be any naturally occurring amino acid
  misc_feature (90)..(90): Xaa can be any naturally occurring amino acid
  misc_feature (98)..(98): Xaa can be any naturally occurring amino acid
  misc_feature (100)..(100): Xaa can be any naturally occurring amino acid
  misc_feature (106)..(106): Xaa can be any naturally occurring amino acid
  misc_feature (113)..(113): Xaa can be any naturally occurring amino acid
  misc_feature (116)..(116): Xaa can be any naturally occurring amino acid
  misc_feature (125)..(125): Xaa can be any naturally occurring amino acid
  misc_feature (126)..(126): Xaa can be any naturally occurring amino acid
  misc_feature (128)..(133): Each Xaa can independently be any naturally occurring amino acid
  misc_feature (135)..(135): Xaa can be any naturally occurring amino acid
  misc_feature (137)..(137): Xaa can be any naturally occurring amino acid
  misc_feature (139)..(147): Each Xaa can independently be any naturally occurring amino acid
  misc_feature (153)..(155): Each Xaa can independently be any naturally occurring amino acid
  misc_feature (157)..(157): Xaa can be any naturally occurring amino acid
  misc_feature (159)..(159): Xaa can be any naturally occurring amino acid
  misc_feature (161)..(161): Xaa can be any naturally occurring amino acid
  misc_feature (163)..(163): Xaa can be any naturally occurring amino acid
  misc_feature (166)..(168): Each Xaa can independently be any naturally occurring amino acid
  misc_feature (170)..(170): Xaa can be any naturally occurring amino acid
  misc_feature (171)..(171): Xaa can be any naturally occurring amino acid
  misc_feature (173)..(175): Each Xaa can independently be any naturally occurring amino acid
  misc_feature (177)..(177): Xaa can be any naturally occurring amino acid
  misc_feature (183)..(183): Xaa can be any naturally occurring amino acid
  misc_feature (185)..(187): Each Xaa can independently be any naturally occurring amino acid
  misc_feature (189)..(189): Xaa can be any naturally occurring amino acid
  misc_feature (192)..(195): Each Xaa can independently be any naturally occurring amino acid
  misc_feature (198)..(198): Xaa can be any naturally occurring amino acid
  misc_feature (199)..(199): Xaa can be any naturally occurring amino acid
  misc_feature (202)..(202): Xaa can be any naturally occurring amino acid
  misc_feature (206)..(206): Xaa can be any naturally occurring amino acid
  misc_feature (207)..(207): Xaa can be any naturally occurring amino acid
  misc_feature (210)..(210): Xaa can be any naturally occurring amino acid
  misc_feature (212)..(212): Xaa can be any naturally occurring amino acid
  misc_feature (213)..(213): Xaa can be any naturally occurring amino acid
  misc_feature (219)..(219): Xaa can be any naturally occurring amino acid
  misc_feature (220)..(220): Xaa can be any naturally occurring amino acid
  misc_feature (222)..(222): Xaa can be any naturally occurring amino acid
  misc_feature (224)..(224): Xaa can be any naturally occurring amino acid
  misc_feature (226)..(226): Xaa can be any naturally occurring amino acid
  misc_feature (236)..(236): Xaa can be any naturally occurring amino acid
  misc_feature (240)..(240): Xaa can be any naturally occurring amino acid
  misc_feature (241)..(241): Xaa can be any naturally occurring amino acid
  misc_feature (244)..(246): Each Xaa can independently be any naturally occurring amino acid
  misc_feature (248)..(248): Xaa can be any naturally occurring amino acid
  misc_feature (249)..(249): Xaa can be any naturally occurring amino acid
  misc_feature (250)..(250): Xaa can be any naturally occurring amino acid
  misc_feature (252)..(254): Each Xaa can independently be any naturally occurring amino acid
  misc_feature (256)..(256): Xaa can be any naturally occurring amino acid
  misc_feature (257)..(257): Xaa can be any naturally occurring amino acid
  misc_feature (268)..(268): Xaa can be any naturally occurring amino acid
  misc_feature (271)..(271): Xaa can be any naturally occurring amino acid
  misc_feature (273)..(273): Xaa can be any naturally occurring amino acid
  misc_feature (277)..(277): Xaa can be any naturally occurring amino acid
  misc_feature (280)..(280): Xaa can be any naturally occurring amino acid
  misc_feature (281)..(281): Xaa can be any naturally occurring amino acid
  misc_feature (283)..(283): Xaa can be any naturally occurring amino acid
  misc_feature (289)..(289): Xaa can be any naturally occurring amino acid
  misc_feature (290)..(290): Xaa can be any naturally occurring amino acid
  misc_feature (292)..(294): Each Xaa can independently be any naturally occurring amino acid
  misc_feature (301)..(301): Xaa can be any naturally occurring amino acid
  misc_feature (308)..(308): Xaa can be any naturally occurring amino acid
  misc_feature (319)..(322): Each Xaa can independently be any naturally occurring amino acid
  misc_feature (328)..(328): Xaa can be any naturally occurring amino acid
  misc_feature (329)..(329): Xaa can be any naturally occurring amino acid
  misc_feature (335)..(337): Each Xaa can independently be any naturally occurring amino acid
  misc_feature (346)..(346): Xaa can be any naturally occurring amino acid
  misc_feature (347)..(347): Xaa can be any naturally occurring amino acid
  misc_feature (356)..(361): Each Xaa can independently be any naturally occurring amino acid
  misc_feature (363)..(363): Xaa can be any naturally occurring amino acid
  misc_feature (370)..(373): Each Xaa can independently be any naturally occurring amino acid
  misc_feature (375)..(375): Xaa can be any naturally occurring amino acid
  misc_feature (376)..(376): Xaa can be any naturally occurring amino acid
  misc_feature (379)..(379): Xaa can be any naturally occurring amino acid
  misc_feature (386)..(390): Each Xaa can independently be any naturally occurring amino acid
  misc_feature (393)..(393): Xaa can be any naturally occurring amino acid
  misc_feature (395)..(395): Xaa can be any naturally occurring amino acid
  misc_feature (396)..(396): Xaa can be any naturally occurring amino acid
  misc_feature (398)..(398): Xaa can be any naturally occurring amino acid
  misc_feature (400)..(400): Xaa can be any naturally occurring amino acid
  misc_feature (403)..(403): Xaa can be any naturally occurring amino acid
  misc_feature (407)..(407): Xaa can be any naturally occurring amino acid
  misc_feature (410)..(410): Xaa can be any naturally occurring amino acid
  misc_feature (411)..(411): Xaa can be any naturally occurring amino acid
  misc_feature (413)..(416): Each Xaa can independently be any naturally occurring amino acid
  misc_feature (418)..(418): Xaa can be any naturally occurring amino acid
  misc_feature (422)..(422): Xaa can be any naturally occurring amino acid
  misc_feature (428)..(428): Xaa can be any naturally occurring amino acid
  misc_feature (431)..(431): Xaa can be any naturally occurring amino acid
  misc_feature (433)..(433): Xaa can be any naturally occurring amino acid
  misc_feature (437)..(439): Each Xaa can independently be any naturally occurring amino acid
  misc_feature (445)..(445): Xaa can be any naturally occurring amino acid
  misc_feature (451)..(451): Xaa can be any naturally occurring amino acid
  misc_feature (456)..(456): Xaa can be any naturally occurring amino acid
  misc_feature (459)..(459): Xaa can be any naturally occurring amino acid
  misc_feature (465)..(469): Each Xaa can independently be any naturally occurring amino acid
  misc_feature (481)..(481): Xaa can be any naturally occurring amino acid
  misc_feature (482)..(482): Xaa can be any naturally occurring amino acid
  misc_feature (484)..(484): Xaa can be any naturally occurring amino acid
  misc_feature (490)..(490): Xaa can be any naturally occurring amino acid
  misc_feature (494)..(494): Xaa can be any naturally occurring amino acid
  misc_feature (495)..(502): RuvC-like domain
  misc_feature (497)..(497): Xaa can be any naturally occurring amino acid
  misc_feature (506)..(506): Xaa can be any naturally occurring amino acid
  misc_feature (510)..(510): Xaa can be any naturally occurring amino acid
  misc_feature (513)..(513): Xaa can be any naturally occurring amino acid
  misc_feature (514)..(514): Xaa can be any naturally occurring amino acid
  misc_feature (517)..(517): Xaa can be any naturally occurring amino acid
  misc_feature (520)..(520): Xaa can be any naturally occurring amino acid
  misc_feature (525)..(525): Xaa can be any naturally occurring amino acid
  misc_feature (526)..(526): Xaa can be any naturally occurring amino acid
  misc_feature (529)..(529): Xaa can be any naturally occurring amino acid
  misc_feature (531)..(531): Xaa can be any naturally occurring amino acid
  misc_feature (532)..(532): Xaa can be any naturally occurring amino acid
  misc_feature (534)..(534): Xaa can be any naturally occurring amino acid
  misc_feature (542)..(542): Xaa can be any naturally occurring amino acid
  misc_feature (546)..(546): Xaa can be any naturally occurring amino acid
  misc_feature (547)..(547): Xaa can be any naturally occurring amino acid
  misc_feature (553)..(553): Xaa can be any naturally occurring amino acid
  misc_feature (555)..(575): HNH-like domain
  misc_feature (556)..(556): Xaa can be any naturally occurring amino acid
  misc_feature (560)..(560): Xaa can be any naturally occurring amino acid
  misc_feature (563)..(563): Xaa can be any naturally occurring amino acid
  misc_feature (565)..(565): Xaa can be any naturally occurring amino acid
  misc_feature (567)..(567): Xaa can be any naturally occurring amino acid
  misc_feature (579)..(579): Xaa can be any naturally occurring amino acid
  misc_feature (582)..(582): Xaa can be any naturally occurring amino acid
  misc_feature (583)..(583): Xaa can be any naturally occurring amino acid
  misc_feature (585)..(585): Xaa can be any naturally occurring amino acid
  misc_feature (588)..(588): Xaa can be any naturally occurring amino acid
  misc_feature (590)..(590): Xaa can be any naturally occurring amino acid
  misc_feature (592)..(592): Xaa can be any naturally occurring amino acid
  misc_feature (594)..(596): Each Xaa can independently be any naturally occurring amino acid
  misc_feature (610)..(610): Xaa can be any naturally occurring amino acid
  misc_feature (616)..(616): Xaa can be any naturally occurring amino acid
  misc_feature (628)..(628): Xaa can be any naturally occurring amino acid
  misc_feature (631)..(631): Xaa can be any naturally occurring amino acid
  misc_feature (633)..(633): Xaa can be any naturally occurring amino acid
  misc_feature (634)..(634): Xaa can be any naturally occurring amino acid
  misc_feature (636)..(636): Xaa can be any naturally occurring amino acid
  misc_feature (638)..(641): Each Xaa can independently be any naturally occurring amino acid
  misc_feature (643)..(645): Each Xaa can independently be any naturally occurring amino acid
  misc_feature (653)..(653): Xaa can be any naturally occurring amino acid
  misc_feature (657)..(657): Xaa can be any naturally occurring amino acid
  misc_feature (659)..(659): Xaa can be any naturally occurring amino acid
  misc_feature (660)..(660): Xaa can be any naturally occurring amino acid
  misc_feature (665)..(665): Xaa can be any naturally occurring amino acid
  misc_feature (666)..(666): Xaa can be any naturally occurring amino acid
  misc_feature (668)..(668): Xaa can be any naturally occurring amino acid
  misc_feature (669)..(669): Xaa can be any naturally occurring amino acid
  misc_feature (670)..(677): RuvC-like domain
  misc_feature (680)..(680): Xaa can be any naturally occurring amino acid
  misc_feature (681)..(681): Xaa can be any naturally occurring amino acid
  misc_feature (683)..(683): Xaa can be any naturally occurring amino acid
  misc_feature (686)..(686): Xaa can be any naturally occurring amino acid
  misc_feature (696)..(696): Xaa can be any naturally occurring amino acid
  misc_feature (697)..(697): Xaa can be any naturally occurring amino acid
  misc_feature (704)..(704): Xaa can be any naturally occurring amino acid
  misc_feature (708)..(708): Xaa can be any naturally occurring amino acid
  misc_feature (710)..(710): Xaa can be any naturally occurring amino acid
  misc_feature (711)..(711): Xaa can be any naturally occurring amino acid
  misc_feature (714)..(714): Xaa can be any naturally occurring amino acid
  misc_feature (717)..(720): Each Xaa can independently be any naturally occurring amino acid
  misc_feature (722)..(722): Xaa can be any naturally occurring amino acid
  misc_feature (725)..(725): Xaa can be any naturally occurring amino acid
  misc_feature (727)..(727): Xaa can be any naturally occurring amino acid
  misc_feature (733)..(735): Each Xaa can independently be any naturally occurring amino acid
  misc_feature (740)..(740): Xaa can be any naturally occurring amino acid
  misc_feature (742)..(742): Xaa can be any naturally occurring amino acid
  misc_feature (749)..(754): Each Xaa can independently be any naturally occurring amino acid
  misc_feature (758)..(761): Each Xaa can independently be any naturally occurring amino acid
  misc_feature (763)..(768): Each Xaa can independently be any naturally occurring amino acid
  misc_feature (771)..(771): Xaa can be any naturally occurring amino acid
  misc_feature (774)..(777): Each Xaa can independently be any naturally occurring amino acid
  misc_feature (782)..(782): Xaa can be any naturally occurring amino acid
  misc_feature (784)..(786): Each Xaa can independently be any naturally occurring amino acid
  misc_feature (788)..(788): Xaa can be any naturally occurring amino acid
  misc_feature (790)..(790): Xaa can be any naturally occurring amino acid
  misc_feature (795)..(795): Xaa can be any naturally occurring amino acid
  misc_feature (799)..(799): Xaa can be any naturally occurring amino acid
  misc_feature (801)..(801): Xaa can be any naturally occurring amino acid
  misc_feature (802)..(802): Xaa can be any naturally occurring amino acid
  misc_feature (804)..(804): Xaa can be any naturally occurring amino acid
  misc_feature (806)..(813): Each Xaa can independently be any naturally occurring amino acid
  misc_feature (815)..(818): Each Xaa can independently be any naturally occurring amino acid
  misc_feature (820)..(820): Xaa can be any naturally occurring amino acid
  misc_feature (823)..(827): Each Xaa can independently be any naturally occurring amino acid
  misc_feature (829)..(829): Xaa can be any naturally occurring amino acid
  misc_feature (830)..(830): Xaa can be any naturally occurring amino acid
  misc_feature (832)..(832): Xaa can be any naturally occurring amino acid
  misc_feature (835)..(837): Each Xaa can independently be any naturally occurring amino acid
  misc_feature (842)..(844): Each Xaa can independently be any naturally occurring amino acid
  misc_feature (846)..(846): Xaa can be any naturally occurring amino acid
  misc_feature (848)..(848): Xaa can be any naturally occurring amino acid
  misc_feature (851)..(851): Xaa can be any naturally occurring amino acid
  misc_feature (857)..(857): Xaa can be any naturally occurring amino acid
  misc_feature (857)..(857): Xaa can be any naturally occurring amino acid
MKYXIGLDIGTNSVGWAVTDXYXXKXKGXXXIXKNXGLFDGTARXRTARRRRRXNRIYLQIFXEMDFFRLXSFVXXKXXXPXFXXEYHXXPTIYHLRXLXKDLRLXYLALAHXIKXRGNFLIEGXXNXXXXXXYXFXIXXXXXXXXXPEKGFXXXLXGXFXFXLEXXXKXXYXXXLXLLIGDXYXXXFXAKXXXXLSXXVTXALSXXMIXRXXHDLLKXXYXEXFXKGYAGYIDGXQFYXXKLXXXGXXXKXXXEXXLRKQRTFDNGXIPXQXHLEXAIXXQXYPFLNXXIXXXTFRIPYXVGPLAGXSFAWRKIPWNXXXXDSAFIXXMTDLPXXXVLPKHSLYXXVYNELTKVXXXXXXKXIFKRKVXXXXGXXFNXSTYHDLXXXXXLDXNXXEXIXLTXFEDXMIXXLXXXXKXLRRXYTGWGXLSXLXGIRXXXSTILDXLDNRNXMQLIXDLXFKIKQXXXXXGSPAIKKGILQXXKXVDELVXMGPXIVXEMARENQTXGNSXRKXXKEXGSXILKEXXNLXNXXLXLYYLQNGXDMYXXLDILSXYDXDHIXPQXFXDXSIDNVLSNRKDXVPXXVXKKXWXLXLXXXRKFDLTKAERGGLXDKAFIXRQLVETRQITKXVAXLXXNXDXXXXVXXXTLKSLVSXFRKXFXXLYKVXXNXXHHAHDAYLNVXXLXYPXLEEFVYGDYXXKATKFYXNIMXFXXGEXWKXXXXVXMQXNXVKKEQXXXPKNSXLXKDKYGGXXXXXXKGKXXXXIXXXXXXFLXGYXXXXLPKYXLXXXGXRXLASEXKGNXLXXLXAXXXXXXXXEXXXXFXANXXXXXLXXGXAFXXXIRRYXXXTXIXQSXTGLYEXRL

SEQ ID NO: 15 - protein, 8 aa, Artificial Sequence
  RuvC-like domain
  VARIANT (2)..(2): Xaa is Val or His
  VARIANT (3)..(3): Xaa is Ile, Leu, or Val
  VARIANT (5)..(5): Xaa is Met or Thr
IXXEXARE

SEQ ID NO: 16 - protein, 8 aa, Artificial Sequence
  RuvC-like domain
  VARIANT (3)..(3): Xaa is Ile, Leu, or Val
IVXEMARE

SEQ ID NO: 17 - protein, 8 aa, Artificial Sequence
  RuvC-like domain
  VARIANT (4)..(4): Xaa is His or Leu
  VARIANT (7)..(7): Xaa is Arg or Val
  VARIANT (8)..(8): Xaa is Glu or Val
HHAXDAXX

SEQ ID NO: 18 - protein, 8 aa, Artificial Sequence
  RuvC-like domain
HHAHDAYL

SEQ ID NO: 19 - protein, 30 aa, Artificial Sequence
  N-terminal RuvC-like domain
  VARIANT (2)..(2): Xaa is Lys or Pro
  VARIANT (4)..(4): Xaa is Val, Leu, Ile, or Phe
  VARIANT (5)..(5): Xaa is Gly, Ala, or Ser
  VARIANT (6)..(6): Xaa is Leu, Ile, Val, or Phe
  MOD_RES (7)..(26): N-terminal RuvC-like domain, each Xaa can be any amino acid or absent, region may encompass 5-20 residues
  VARIANT (29)..(29): Xaa is Asp, Glu, Asn, or Gln
KXYXXXXXXXXXXXXXXXXXXXXXXXTDXY

SEQ ID NO: 20 - protein, 12 aa, Artificial Sequence
  N-terminal RuvC-like domain
  VARIANT (2)..(2): Xaa is Ile, Val, Met, Leu, or Thr
  VARIANT (4)..(4): Xaa is Thr, Ile, Val, Ser, Asn, Tyr, Glu, or Leu
  VARIANT (5)..(5): Xaa is Asn, Ser, Gly, Ala, Asp, Thr, Arg, Met, or Phe
  VARIANT (6)..(6): Xaa is Ser, Tyr, Asn, or Phe
  VARIANT (7)..(7): Xaa is Val, Ile, Leu, Cys, Thr, or Phe
  VARIANT (9)..(9): Xaa is Trp, Phe, Val, Tyr, Ser, or Leu
  VARIANT (10)..(10): Xaa is Ala, Ser, Cys, Val, or Gly
  VARIANT (11)..(11): Xaa is Val, Ile, Leu, Ala, Met, or His
  VARIANT (12)..(12): Any amino acid or absent
DXGXXXXGXXXX

SEQ ID NO: 21 - protein, 12 aa, Artificial Sequence
  N-terminal RuvC-like domain
  VARIANT (2)..(2): Xaa is Ile, Val, Met, Leu, or Thr
  VARIANT (4)..(4): Xaa is Thr, Ile, Val, Ser, Asn, Tyr, Glu, or Leu
  VARIANT (5)..(5): Xaa is Asn, Ser, Gly, Ala, Asp, Thr, Arg, Met, or Phe
  VARIANT (7)..(7): Xaa is Val, Ile, Leu, Cys, Thr, or Phe
  VARIANT (9)..(9): Xaa is Trp, Phe, Val, Tyr, Ser, or Leu
  VARIANT (10)..(10): Xaa is Ala, Ser, Cys, Val, or Gly
  VARIANT (11)..(11): Xaa is Val, Ile, Leu, Ala, Met, or His
  VARIANT (12)..(12): Any amino acid or absent
DXGXXSXGXXXX

SEQ ID NO: 22 - protein, 12 aa, Artificial Sequence
  N-terminal RuvC-like domain
  VARIANT (4)..(4): Xaa is Thr, Ile, Val, Ser, Asn, Tyr, Glu, or Leu
  VARIANT (5)..(5): Xaa is Asn, Ser, Gly, Ala, Asp, Thr, Arg, Met, or Phe
  VARIANT (11)..(11): Xaa is Val, Ile, Leu, Ala, Met, or His
  VARIANT (12)..(12): Any amino acid or absent
DIGXXSVGWAXX

SEQ ID NO: 23 - protein, 12 aa, Artificial Sequence
  N-terminal RuvC-like domain
  MOD_RES (12)..(12): Any non-polar alkyl amino acid or a hydroxyl amino acid
DIGTNSVGWAVX

SEQ ID NO: 24 - protein, 73 aa, Artificial Sequence
  HNH-like domain
  VARIANT (8)..(8): Xaa is Lys or Arg
  VARIANT (12)..(12): Xaa is Val or Thr
  VARIANT (13)..(13): Xaa is Gly or Asp
  VARIANT (14)..(14): Xaa is Glu, Gln, or Asp
  VARIANT (15)..(15): Xaa is Glu or Asp
  VARIANT (19)..(19): Xaa is Asp, Asn, or His
  VARIANT (20)..(20): Xaa is Tyr, Arg, or Asn
  VARIANT (23)..(23): Xaa is Gln, Asp, or Asn
  MOD_RES (25)..(64): HNH-like domain, each Xaa can be any amino acid or absent, region may encompass 15-40 residues
  VARIANT (67)..(67): Xaa is Gly or Glu
  VARIANT (69)..(69): Xaa is Ser or Gly
  VARIANT (71)..(71): Xaa is Asp or Asn
LYYLQNGXDMYXXXXLDIXXLSXYXXXXXXXXXXXXXXXXXXXXXXXXXXXXXXXXXXXXXXXXNRXKXDXVP

SEQ ID NO: 25 - protein, 27 aa, Artificial Sequence
  HNH-like domain
  VARIANT (1)..(1): Xaa is Asp, Glu, Gln, or Asn
  VARIANT (2)..(2): Xaa is Leu, Ile, Arg, Gln, Val, Met, or Lys
  VARIANT (3)..(3): Xaa is Asp or Glu
  VARIANT (5)..(5): Xaa is Ile, Val, Thr, Ala, or Leu
  VARIANT (6)..(6): Xaa is Val, Tyr, Ile, Leu, Phe, or Trp
  VARIANT (8)..(8): Xaa is Gln, His, Arg, Lys, Tyr, Ile, Leu, Phe, or Trp
  VARIANT (9)..(9): Xaa is Ser, Ala, Asp, Thr, or Lys
  VARIANT (10)..(10): Xaa is Phe, Leu, Val, Lys, Tyr, Met, Ile, Arg, Ala, Glu, Asp, or Gln
  VARIANT (11)..(11): Xaa is Leu, Arg, Thr, Ile, Val, Ser, Cys, Tyr, Lys, Phe, or Gly
  VARIANT (12)..(12): Xaa is Lys, Gln, Tyr, Thr, Phe, Leu, Trp, Met, Ala, Glu, Gly, or Ser
  VARIANT (13)..(13): Xaa is Asp, Ser, Asn, Arg, Leu, or Thr
  VARIANT (14)..(14): Xaa is Asp, Asn, or Ser
  VARIANT (15)..(15): Xaa is Ser, Ala, Thr, Gly, or Arg
  VARIANT (16)..(16): Xaa is Ile, Leu, Phe, Ser, Arg, Tyr, Gln, Trp, Asp, Lys, or His
  VARIANT (17)..(17): Xaa is Asp, Ser, Ile, Asn, Glu, Ala, His, Phe, Leu, Gln, Met, Gly, Tyr, or Val
  VARIANT (19)..(19): Xaa is Lys, Leu, Arg, Met, Thr, or Phe
  VARIANT (20)..(20): Xaa is Val, Leu, Ile, Ala, or Thr
  VARIANT (21)..(21): Xaa is Leu, Ile, Val, or Ala
  VARIANT (22)..(22): Xaa is Thr, Val, Cys, Glu, Ser, or Ala
  VARIANT (23)..(23): Xaa is Arg, Phe, Thr, Trp, Glu, Leu, Asn, Cys, Lys, Val, Ser, Gln, Ile, Tyr, His, or Ala
  VARIANT (24)..(24): Xaa is Ser, Pro, Arg, Lys, Asn, Ala, His, Gln, Gly, or Leu
  VARIANT (25)..(25): Xaa is Asp, Gly, Thr, Asn, Ser, Lys, Ala, Ile, Glu, Leu, Gln, Arg, or Tyr
  VARIANT (26)..(26): Xaa is Lys, Val, Ala, Glu, Tyr, Ile, Cys, Leu, Ser, Thr, Gly, Lys, Met, Asp, or Phe
XXXHXXPXXXXXXXXXXNXXXXXXXXN

SEQ ID NO: 26 - protein, 27 aa, Artificial Sequence
  HNH-like domain
  VARIANT (1)..(1): Xaa is Asp or Glu
  VARIANT (2)..(2): Xaa is Leu, Ile, Arg, Gln, Val, Met, or Lys
  VARIANT (3)..(3): Xaa is Asp or Glu
  VARIANT (5)..(5): Xaa is Ile, Val, Thr, Ala, or Leu
  VARIANT (6)..(6): Xaa is Val, Tyr, Ile, Leu, Phe, or Trp
  VARIANT (8)..(8): Xaa is Gln, His, Arg, Lys, Tyr, Ile, Leu, Phe, or Trp
  VARIANT (10)..(10): Xaa is Phe, Leu, Val, Lys, Tyr, Met, Ile, Arg, Ala, Glu, Asp, or Gln
  VARIANT (11)..(11): Xaa is Leu, Arg, Thr, Ile, Val, Ser, Cys, Tyr, Lys, Phe, or Gly
  VARIANT (12)..(12): Xaa is Lys, Gln, Tyr, Thr, Phe, Leu, Trp, Met, Ala, Glu, Gly, or Ser
  VARIANT (16)..(16): Xaa is Ile, Leu, Phe, Ser, Arg, Tyr, Gln, Trp, Asp, Lys, or His
  VARIANT (17)..(17): Xaa is Asp, Ser, Ile, Asn, Glu, Ala, His, Phe, Leu, Gln, Met, Gly, Tyr, or Val
  VARIANT (22)..(22): Xaa is Thr, Val, Cys, Glu, Ser, or Ala
  VARIANT (23)..(23): Xaa is Arg, Phe, Thr, Trp, Glu, Leu, Asn, Cys, Lys, Val, Ser, Gln, Ile, Tyr, His, or Ala
  VARIANT (24)..(24): Xaa is Ser, Pro, Arg, Lys, Asn, Ala, His, Gln, Gly, or Leu
  VARIANT (25)..(25): Xaa is Asp, Gly, Thr, Asn, Ser, Lys, Ala, Ile, Glu, Leu, Gln, Arg, or Tyr
  VARIANT (26)..(26): Xaa is Lys, Val, Ala, Glu, Tyr, Ile, Cys, Leu, Ser, Thr, Gly, Lys, Met, Asp, or Phe
XXXHXXPXSXXXDDSXXNKVLXXXXXN

SEQ ID NO: 27 - protein, 27 aa, Artificial Sequence
  HNH-like domain
  VARIANT (1)..(1): Xaa is Asp or Glu
  VARIANT (3)..(3): Xaa is Asp or Glu
  VARIANT (8)..(8): Xaa is Gln, His, Arg, Lys, Tyr, Ile, Leu, or Trp
  VARIANT (10)..(10): Xaa is Phe, Leu, Val, Lys, Tyr, Met, Ile, Arg, Ala, Glu, Asp, or Gln
  VARIANT (11)..(11): Xaa is Leu, Arg, Thr, Ile, Val, Ser, Cys, Tyr, Lys, Phe, or Gly
  VARIANT (12)..(12): Xaa is Lys, Gln, Tyr, Thr, Phe, Leu, Trp, Met, Ala, Glu, Gly, or Ser
  VARIANT (16)..(16): Xaa is Ile, Leu, Phe, Ser, Arg, Tyr, Gln, Trp, Asp, Lys, or His
  VARIANT (17)..(17): Xaa is Asp, Ser, Ile, Asn, Glu, Ala, His, Phe, Leu, Gln, Met, Gly, Tyr, or Val
  VARIANT (23)..(23): Xaa is Arg, Phe, Thr, Trp, Glu, Leu, Asn, Cys, Lys, Val, Ser, Gln, Ile, Tyr, His, or Ala
  VARIANT (24)..(24): Xaa is Ser, Pro, Arg, Lys, Asn, Ala, His, Gln, Gly, or Leu
  VARIANT (25)..(25): Xaa is Asp, Gly, Thr, Asn, Ser, Lys, Ala, Ile, Glu, Leu, Gln, Arg, or Tyr
  VARIANT (26)..(26): Xaa is Lys, Val, Ala, Glu, Tyr, Ile, Cys, Leu, Ser, Thr, Gly, Lys, Met, Asp, or Phe
XVXHIVPXSXXXDDSXXNKVLTXXXXN

SEQ ID NO: 28 - protein, 27 aa, Artificial Sequence
  HNH-like domain
  VARIANT (2)..(2): Xaa is Ile or Val
  VARIANT (6)..(6): Xaa is Ile or Val
  VARIANT (9)..(9): Xaa is Ala or Ser
  VARIANT (11)..(11): Xaa is Ile or Leu
  VARIANT (12)..(12): Xaa is Lys or Thr
  VARIANT (14)..(14): Xaa is Asp or Asn
  VARIANT (19)..(19): Xaa is Arg, Lys, or Leu
  VARIANT (22)..(22): Xaa is Thr or Val
  VARIANT (23)..(23): Xaa is Ser or Arg
  VARIANT (25)..(25): Xaa is Lys, Asp, or Ala
  VARIANT (26)..(26): Xaa is Glu, Lys, Gly, or Asn
DXDHIXPQXFXXDXSIDNXVLXXSXXN

SEQ ID NO: 29 - RNA, 116 nt, Artificial Sequence
  gRNA
  misc_feature (1)..(20): a, c, u, g, unknown or other
  misc_feature (1)..(20): targeting region
  misc_feature (21)..(42): first complementarity domain
  misc_feature (43)..(46): linking domain
  misc_feature (47)..(70): second complementarity domain
nnnnnnnnnnnnnnnnnnnnguuuuagagcuaugcuguuuuggaaacaaaacagcauagcaaguuaaaauaaggcuaguccguuaucaacuugaaaaaguggcaccgagucggugc

SEQ ID NO: 30 - RNA, 116 nt, Artificial Sequence
  gRNA
  misc_feature (1)..(20): a, c, u, g, unknown or other
  misc_feature (1)..(20): targeting region
  misc_feature (21)..(42): first complementarity domain
  misc_feature (43)..(46): linking domain
  misc_feature (47)..(70): second complementarity domain
nnnnnnnnnnnnnnnnnnnnguauuagagcuaugcuguauuggaaacaauacagcauagcaaguuaauauaaggcuaguccguuaucaacuugaaaaaguggcaccgagucggugc

SEQ ID NO: 31 - RNA, 96 nt, Artificial Sequence
  gRNA
  misc_feature (1)..(20): a, c, u, g, unknown or other
  misc_feature (1)..(20): targeting domain
  misc_feature (21)..(32): first complementarity domain
  misc_feature (33)..(36): linking domain
  misc_feature (37)..(50): second complementarity domain
  misc_feature (51)..(62): proximal domain
nnnnnnnnnnnnnnnnnnnnguuuaagagcuagaaauagcaaguuuaaauaaggcuaguccguuaucaacuugaaaaaguggcaccgagucggugc

SEQ ID NO: 32 - RNA, 47 nt, Artificial Sequence
  gRNA proximal and tail domains derived from S. pyogenes
aaggcuaguccguuaucaacuugaaaaaguggcaccgagucggugcu

SEQ ID NO: 33 - RNA, 49 nt, Artificial Sequence
  gRNA proximal and tail domains
aaggcuaguccguuaucaacuugaaaaaguggcaccgagucgguggugc

SEQ ID NO: 34 - RNA, 51 nt, Artificial Sequence
  gRNA proximal and tail domains
aaggcuaguccguuaucaacuugaaaaaguggcaccgagucggugcggauc

SEQ ID NO: 35 - RNA, 31 nt, Artificial Sequence
  gRNA proximal and tail domains
aaggcuaguccguuaucaacuugaaaaagug

SEQ ID NO: 36 - RNA, 18 nt, Artificial Sequence
  gRNA proximal and tail domains
aaggcuaguccguuauca

SEQ ID NO: 37 - RNA, 12 nt, Artificial Sequence
  gRNA proximal and tail domains
aaggcuaguccg

SEQ ID NO: 38 - RNA, 102 nt, Artificial Sequence
  Unimolecular gRNA derived from S. aureus
  misc_feature (1)..(20): n is a, c, g, or u
  misc_feature (1)..(20): Targeting domain
nnnnnnnnnnnnnnnnnnnnguuuuaguacucuggaaacagaaucuacuaaaacaaggcaaaaugccguguuuaucucgucaacuuguuggcgagauuuuuu

SEQ ID NO: 39 - RNA, 42 nt, Artificial
  Modular gRNA derived from S. pyogenes
  misc_feature (1)..(20): a, c, u, g, unknown or other
  misc_feature (1)..(20): Targeting domain
  misc_feature (21)..(42): First complementarity domain
nnnnnnnnnnnnnnnnnnnnguuuuagagcuaugcuguuuug

SEQ ID NO: 40 - RNA, 85 nt, Artificial Sequence
  Modular gRNA derived from S. pyogenes
  misc_feature (1)..(9): 5' extension domain
  misc_feature (10)..(33): Second complementarity domain
  misc_feature (34)..(45): Proximal domain
  misc_feature (46)..(85): Tail domain
ggaaccauucaaaacagcauagcaaguuaaaauaaggcuaguccguuaucaacuugaaaaaguggcaccgagucggugcuuuuuu

SEQ ID NO: 41 - RNA, 62 nt, Artificial Sequence
  Unimolecular gRNA derived from S. pyogenes
  misc_feature (1)..(20): a, c, u, g, unknown or other
  misc_feature (1)..(20): Targeting domain
  misc_feature (21)..(32): First complementarity domain
  misc_feature (33)..(36): Linking domain
  misc_feature (37)..(50): Second complementarity domain
  misc_feature (51)..(62): Proximal domain
nnnnnnnnnnnnnnnnnnnnguuuuagagcuagaaauagcaaguuaaaauaaggcuaguccg

SEQ ID NO: 42 - RNA, 102 nt, Artificial Sequence
  Unimolecular gRNA derived from S. pyogenes
  misc_feature (1)..(20): a, c, u, g, unknown or other
  misc_feature (1)..(20): Targeting domain
  misc_feature (21)..(32): First complementarity domain
  misc_feature (33)..(36): Linking domain
  misc_feature (37)..(50): Second complementarity domain
  misc_feature (51)..(62): Proximal domain
  misc_feature (63)..(102): Tail domain
nnnnnnnnnnnnnnnnnnnnguuuuagagcuagaaauagcaaguuaaaauaaggcuaguccguuaucaacuugaaaaaguggcaccgagucggugcuuuuuu

SEQ ID NO: 43 - RNA, 75 nt, Artificial Sequence
  Unimolecular gRNA derived from S. pyogenes
  misc_feature (1)..(20): Targeting domain
  misc_feature (1)..(20): a, c, u, g, unknown or other
  misc_feature (21)..(36): First complementarity domain
  misc_feature (37)..(40): Linking domain
  misc_feature (41)..(58): Second complementarity domain
  misc_feature (59)..(70): Proximal domain
  misc_feature (71)..(75): Tail domain
nnnnnnnnnnnnnnnnnnnnguuuuagagcuaugcugaaaagcauagcaaguuaaaauaaggcuaguccguuauc

SEQ ID NO: 44 - RNA, 87 nt, Artificial Sequence
  Unimolecular gRNA derived from S. pyogenes
  misc_feature (1)..(20): a, c, u, g, unknown or other
  misc_feature (1)..(20): Targeting domain
  misc_feature (21)..(32): First complementarity domain
  misc_feature (43)..(46): Linking domain
  misc_feature (57)..(70): Second complementarity domain
  misc_feature (71)..(82): Proximal domain
  misc_feature (83)..(87): Tail domain
nnnnnnnnnnnnnnnnnnnnguuuuagagcuaugcuguuuuggaaacaaaacagcauagcaaguuaaaauaaggcuaguccguuauc

SEQ ID NO: 45 - RNA, 42 nt, Artificial Sequence
  Modular gRNA derived from S. thermophilus
  misc_feature (1)..(20): a, c, u, g, unknown or other
  misc_feature (1)..(20): Targeting domain
  misc_feature (21)..(42): First complementarity domain
nnnnnnnnnnnnnnnnnnnnguuuuagagcuguguuguuucg

SEQ ID NO: 46 - RNA, 78 nt, Artificial Sequence
  Modular gRNA derived from S. thermophilus
  misc_feature (1)..(3): 5' extension domain
  misc_feature (4)..(27): Second complementarity domain
  misc_feature (28)..(40): Proximal domain
  misc_feature (41)..(78): Tail domain
gggcgaaacaacacagcgaguuaaaauaaggcuuaguccguacucaacuugaaaagguggcaccgauucgguguuuuu

SEQ ID NO: 47 - RNA, 85 nt, Artificial Sequence
  Modular gRNA derived from S. pyogenes
gaaccauucaaaacagcauagcaaguuaaaauaaggcuaguccguuaucaacuugaaaaaguggcaccgagucggugcuuuuuuu

SEQ ID NO: 48 - RNA, 96 nt, Artificial Sequence
  gRNA from S. pyogenes
  misc_feature (1)..(20): n is a, c, g, or u
  misc_feature (1)..(20): Targeting domain
nnnnnnnnnnnnnnnnnnnnguuuuagagcuagaaauagcaaguuaaaauaaggcuaguccguuaucaacuugaaaaaguggcaccgagucggugc

SEQ ID NO: 49 - RNA, 96 nt, Artificial Sequence
  gRNA
  misc_feature (1)..(20): n is a, c, g, or u
  misc_feature (1)..(20): Targeting domain
  misc_feature (21)..(32): First complementarity domain
  misc_feature (33)..(36): Linking domain
  misc_feature (37)..(50): Second complementarity domain
  misc_feature (51)..(62): Proximal domain
nnnnnnnnnnnnnnnnnnnnguauuagagcuagaaauagcaaguuaauauaaggcuaguccguuaucaacuugaaaaaguggcaccgagucggugc

SEQ ID NO: 50 - RNA, 104 nt, Artificial Sequence
  gRNA
  misc_feature (1)..(20): n is a, c, g, or u
  misc_feature (1)..(20): Targeting domain
  misc_feature (21)..(36): First complementarity domain
  misc_feature (37)..(40): Linking domain
  misc_feature (41)..(58): Second complementarity domain
nnnnnnnnnnnnnnnnnnnnguuuuagagcuaugcugaaaagcauagcaaguuaaaauaaggcuaguccguuaucaacuugaaaaaguggcaccgagucggugc

SEQ ID NO: 51 - RNA, 106 nt, Artificial Sequence
  gRNA
  misc_feature (1)..(20): n is a, c, g, or u
  misc_feature (1)..(20): Targeting domain
  misc_feature (21)..(37): First complementarity domain
  misc_feature (38)..(41): Linking domain
  misc_feature (42)..(60): Second complementarity domain
nnnnnnnnnnnnnnnnnnnnguuuuagagcuaugcuggaaacagcauagcaaguuaaaauaaggcuaguccguuaucaacuugaaaaaguggcaccgagucggugc

SEQ ID NO: 52 - protein, 12 aa, Peptoniphilus duerdenii
DIGTASVGWAVT

SEQ ID NO: 53 - protein, 12 aa, Treponema denticola
DVGTGSVGWAVT

SEQ ID NO: 54 - protein, 12 aa, S. mutans
DIGTNSVGWAVV

SEQ ID NO: 55 - protein, 12 aa, S. pyogenes
DIGTNSVGWAVI

SEQ ID NO: 56 - protein, 12 aa, L. innocua
DIGTNSVGWAVL

SEQ ID NO: 57 - protein, 12 aa, Flavobacterium branchiophilum FL-15
DLGTNSIGWAVV

SEQ ID NO: 58 - protein, 11 aa, Pedobacter glucosidilyticus
DLGTNSIGWAI

SEQ ID NO: 59 - protein, 12 aa, Bacteroides fragilis, NCTC 9343
DLGTNSIGWALV

SEQ ID NO: 60 - protein, 12 aa, Fusobacterium nucleatum
DIGTNSVGWCVT

SEQ ID NO: 61 - protein, 12 aa, Acidaminococcus sp. D21
DIGTNSVGYAVT

SEQ ID NO: 62 - protein, 12 aa, Coprococcus catus GD-7
DMGTGSLGWAVT

SEQ ID NO: 63 - protein, 12 aa, Oenococcus kitaharae DSM 17330
DIGTSSVGWAAI

SEQ ID NO: 64 - protein, 12 aa, Catenibacterium mitsuokai DSM 15897
DLGTGSVGWAVV

SEQ ID NO: 65 - protein, 12 aa, Mycoplasma gallisepticum str. F
DLGVGSVGWAIV

SEQ ID NO: 66 - protein, 12 aa, Mycoplasma ovipneumoniae SC01
DLGIASIGWAII

SEQ ID NO: 67 - protein, 12 aa, Mycoplasma canis PG 14
DLGIASVGWAIV

SEQ ID NO: 68 - protein, 12 aa, Mycoplasma synoviae 53
DLGVASVGWSIV

SEQ ID NO: 69 - protein, 12 aa, Eubacterium rectale
DIGIASVGWAIL

SEQ ID NO: 70 - protein, 12 aa, Enterococcus faecalis TX0012
DLGISSVGWSVI

SEQ ID NO: 71 - protein, 12 aa, Ilyobacter polytropus DSM 2926
DIGIASVGWSVI

SEQ ID NO: 72 - protein, 12 aa, Ruminococcus albus 8
DVGIGSIGWAVI

SEQ ID NO: 73 - protein, 12 aa, Elusimicrobium minutum Pei191
DLGVGSIGFAIV

SEQ ID NO: 74 - protein, 12 aa, Akkermansia muciniphila
DIGYASIGWAVI

SEQ ID NO: 75 - protein, 12 aa, Prevotella ruminicola
DTGTNSLGWAIV

SEQ ID NO: 76 - protein, 12 aa, Cand. Puniceispirillum marinum
DLGTNSIGWCLL

SEQ ID NO: 77 - protein, 12 aa, Rhodospirillum rubrum
DIGTDSLGWAVF

SEQ ID NO: 78 - protein, 12 aa, Lactobacillus rhamnosus GG
DIGSNSIGFAVV

SEQ ID NO: 79 - protein, 12 aa, Sphaerochaeta globus str. Buddy
DLGVGSIGVAVA

SEQ ID NO: 80 - protein, 12 aa, Rhodopseudomonas palustris
DLGIASCGWGVV

SEQ ID NO: 81 - protein, 12 aa, Mycoplasma mobile 163K
DLGIASVGWCLT

SEQ ID NO: 82 - protein, 12 aa, Streptococcus thermophilus LMD-9
DIGIGSVGVGIL

SEQ ID NO: 83 - protein, 12 aa, Staphylococcus lugdunensis M23590
DIGITSVGYGLI

SEQ ID NO: 84 - protein, 12 aa, Eubacterium dolichum DSM 3991
DIGITSVGFGII

SEQ ID NO: 85 - protein, 12 aa, Lactobacillus coryniformis KCTC 3535
DVGITSTGYAVL

SEQ ID NO: 86 - protein, 12 aa, Nitratifractor salsuginis DSM 16511
DLGITSFGYAIL

SEQ ID NO: 87 - protein, 12 aa, Bifidobacterium bifidum S17
DIGNASVGWSAF

SEQ ID NO: 88 - protein, 12 aa, Lactobacillus gasseri
DVGTNSCGWVAM

SEQ ID NO: 89 - protein, 12 aa, Acidothermus cellulolyticus 11B
DVGERSIGLAAV

SEQ ID NO: 90 - protein, 12 aa, Bifidobacterium longum DJO10A
DVGLNSVGLAAV

SEQ ID NO: 91 - protein, 12 aa, Bifidobacterium dentium
DVGLMSVGLAAI

SEQ ID NO: 92 - protein, 12 aa, Corynebacterium diphtheriae
DVGTFSVGLAAI

SEQ ID NO: 93 - protein, 12 aa, Staphylococcus pseudintermedius ED99
DIGTGSVGYACM

SEQ ID NO: 94 - protein, 12 aa, Capnocytophaga ochracea
DLGTTSIGFAHI

SEQ ID NO: 95 - protein, 12 aa, Prevotella denticola
DLGTNSIGSSVR

SEQ ID NO: 96 - protein, 12 aa, Ralstonia solanacearum
DIGTNSIGWAVI

SEQ ID NO: 97 - protein, 12 aa, Pasteurella multocida str. Pm70
DLGIASVGWAVV

SEQ ID NO: 98 - protein, 12 aa, Comamonas granuli
DIGIASVGWAVL

SEQ ID NO: 99 - protein, 12 aa, Helicobacter mustelae 12198
DIGIASIGWAVI

SEQ ID NO: 100 - protein, 12 aa, Agathobacter rectalis
DIGIASVGWAII

SEQ ID NO: 101 - protein, 12 aa, Clostridium cellulolyticum H10
DVGIASVGWAVI

SEQ ID NO: 102 - protein, 11 aa, Methylophilus sp. OH31
DIGIASVGWAL

SEQ ID NO: 103 - protein, 12 aa, Neisseria meningitidis
DIGIASVGWAMV

SEQ ID NO: 104 - protein, 12 aa, Clostridium perfringens
DIGITSVGWAVI

SEQ ID NO: 105 - protein, 12 aa, Wolinella succinogenes DSM 1740
DLGISSLGWAIV

SEQ ID NO: 106 - protein, 12 aa, Azospirillum sp. B510
DLGTNSIGWGLL

SEQ ID NO: 107 - protein, 12 aa, Verminephrobacter eiseniae
DLGSTSLGWAIF

SEQ ID NO: 108 - protein, 12 aa, Campylobacter jejuni, NCTC 11168
DIGISSIGWAFS

SEQ ID NO: 109 - protein, 12 aa, Parvibaculum lavamentivorans DS-1
DIGTTSIGFSVI

SEQ ID NO: 110 - protein, 12 aa, Dinoroseobacter shibae DFL 12
DIGTSSIGWWLY

SEQ ID NO: 111 - protein, 12 aa, Nitrobacter hamburgensis X14
DLGSNSLGWFVT

SEQ ID NO: 112 - protein, 12 aa, Bradyrhizobium sp. BTAi1
DLGANSLGWFVV

SEQ ID NO: 113 - protein, 15 aa, Bacillus cereus
DIGLRIGITSCGWSI

SEQ ID NO: 114 - protein, 12 aa, Sutterella wadsworthensis
DMGAKYTGVFYA

SEQ ID NO: 115 - protein, 12 aa, Wolinella succinogenes DSM 1740
DLGGKNTGFFSF

SEQ ID NO: 116 - protein, 12 aa, Francisella tularensis
DLGVKNTGVFSA

SEQ ID NO: 117 - protein, 12 aa, Gamma proteobacterium HTCC5015
DLGAKFTGVALY

SEQ ID NO: 118 - protein, 12 aa, Legionella pneumophila str. Paris
DLGGKFTGVCLS

SEQ ID NO: 119 - protein, 12 aa, Parasutterella excrementihominis
DLGGTYTGTFIT

SEQ ID NO: 120 - protein, 12 aa, S. thermophilus
DIGTNSVGWAVT

SEQ ID NO: 121 - protein, 12 aa, Eubacterium yurii
DVGTNSVGWAVT

SEQ ID NO: 122 - protein, 12 aa, Butyrivibrio hungatei
DMGTNSVGWAVT

SEQ ID NO: 123 - protein, 12 aa, Solobacterium moorei F0204
DVGTSSVGWAVT

SEQ ID NO: 124 - protein, 27 aa, Treponema denticola
DIDHIYPQSKIKDDSISNRVLVCSSCN

SEQ ID NO: 125 - protein, 27 aa, Coprococcus catus GD-7
DIDHIYPQSKTMDDSLNNRVLVKKNYN

SEQ ID NO: 126 - protein, 27 aa, Peptoniphilus duerdenii
DQDHIYPKSKIYDDSLENRVLVKKNLN

SEQ ID NO: 127 - protein, 27 aa, Catenibacterium mitsuokai DSM 15897
QIDHIVPQSLVKDDSFDNRVLVVPSEN

SEQ ID NO: 128 - protein, 27 aa, S. mutans
DIDHIIPQAFIKDNSIDNRVLTSSKEN

SEQ ID NO: 129 - protein, 27 aa, S. thermophilus
DIDHIIPQAFLKDNSIDNKVLVSSASN

SEQ ID NO: 130 - protein, 27 aa, Oenococcus kitaharae DSM 17330
DIDHIIPQAYTKDNSLDNRVLVSNITN

SEQ ID NO: 131 - protein, 27 aa, L. inocua
DIDHIVPQSFITDNSIDNLVLTSSAGN

SEQ ID NO: 132 - protein, 27 aa, S. pyogenes
DVDHIVPQSFLKDDSIDNKVLTRSDKN

SEQ ID NO: 133 - protein, 27 aa, Acidaminococcus sp. D21
NIDHIYPQSMVKDDSLDNKVLVQSEIN

SEQ ID NO: 134 - protein, 27 aa, Lactobacillus rhamnosus GG
DIDHILPQSLIKDDSLDNRVLVNATIN

SEQ ID NO: 135 - protein, 27 aa, Lactobacillus gasseri
DIDHILPQSFIKDDSLENRVLVKKAVN

SEQ ID NO: 136 - protein, 27 aa, Staphylococcus pseudintermedius ED99
EVDHIFPRSFIKDDSIDNKVLVIKKMN

SEQ ID NO: 137 - protein, 27 aa, Olsenella uli
EVDHIIPRSYIKDDSFENKVLVYREEN

SEQ ID NO: 138 - protein, 27 aa, Bifidobacterium bifidum S17
DIDHIIPQAVTQNDSIDNRVLVARAEN

SEQ ID NO: 139 - protein, 27 aa, Mycoplasma gallisepticum str. F
EIDHIIPYSISFDDSSSNKLLVLAESN

SEQ ID NO: 140 - protein, 27 aa, Mycoplasma canis PG 14
EIDHIIPYSLCFDDSSANKVLVHKQSN

SEQ ID NO: 141 - protein, 27 aa, Ilyobacter polytropus DSM 2926
DIDHIIPYSRSMDDSYSNKVLVLSGEN

SEQ ID NO: 142 - protein, 27 aa, Uncultured Termite group 1 bacterium
DIDHIIPYSKSMDDSFNNKVLCLAEEN

SEQ ID NO: 143 - protein, 27 aa, Campylobacter jejuni
EIDHIYPYSRSFDDSYMNKVLVFTKQN

SEQ ID NO: 144 - protein, 27 aa, Clostridium cellulolyticum H10
QIDHIYPYSRSMDDSYMNKVLVLTDEN

SEQ ID NO: 145 - protein, 27 aa, Clostridium perfringens
EIDHIIPFSRSFDDSLSNKILVLGSEN

SEQ ID NO: 146 - protein, 27 aa, N. meningitides
EIDHALPFSRTWDDSFNNKVLVLGSEN

SEQ ID NO: 147 - protein, 27 aa, Pasteurella multocida str. Pm70
EIDHALPFSRTWDDSFNNKVLVLASEN

SEQ ID NO: 148 - protein, 27 aa, Enterococcus faecalis TX0012
EIDHIIPISISLDDSINNKVLVLSKAN

SEQ ID NO: 149 - protein, 27 aa, Eubacterium dolichum DSM 3991
EVDHIIPISISLDDSITNKVLVTHREN

SEQ ID NO: 150 - protein, 27 aa, Acidovorax ebreus
QVDHALPYSRSYDDSKNNKVLVLTHEN

SEQ ID NO: 151 - protein, 27 aa, Streptococcus thermophilus LMD-9
EVDHILPLSITFDDSLANKVLVYATAN

SEQ ID NO: 152 - protein, 27 aa, Eubacterium rectale
EIDHIIPRSISFDDARSNKVLVYRSEN

SEQ ID NO: 153 - protein, 27 aa, Staphylococcus lugdunensis M23590
EVDHIIPRSVSFDNSYHNKVLVKQSEN

SEQ ID NO: 154 - protein, 27 aa, Roseburia intestinalis
DIDHILPYSITFDDSFRNKVLVTSQEN

SEQ ID NO: 155 - protein, 27 aa, Wolinella succinogenes DSM 1740
EIDHILPRSRSADDSFANKVLCLARAN

SEQ ID NO: 156 - protein, 27 aa, Cand. Puniceispirillum marinum
EIEHLLPFSLTLDDSMANKTVCFRQAN

SEQ ID NO: 157 - protein, 27 aa, Azospirillum sp. B510
DIDHILPFSVSLDDSAANKVVCLREAN

SEQ ID NO: 158 - protein, 27 aa, Bradyrhizobium sp. BTAi1
DIDHLIPFSISWDDSAANKVVCMRYAN

SEQ ID NO: 159 - protein, 27 aa, Nitrobacter hamburgensis X14
DIDHILPVAMTLDDSPANKIICMRYAN

SEQ ID NO: 160 - protein, 27 aa, Dinoroseobacter shibae
DVDHILPYSRTLDDSFPNRTLCLREAN

SEQ ID NO: 161 - protein, 27 aa, Verminephrobacter eiseniae
EIEHILPFSRTLDDSLNNRTVAMRRAN

SEQ ID NO: 162 - protein, 27 aa, Lactobacillus coryniformis KCTC 3535
EVDHIIPYSISWDDSYTNKVLTSAKCN

SEQ ID NO: 163 - protein, 27 aa, Rhodopseudomonas palustris
QVDHILPWSRFGDDSYLNKTLCTARSN

SEQ ID NO: 164 - protein, 27 aa, Ralstonia syzygii R24
QVDHILPFSKTLDDSFANKVLAQHDAN

SEQ ID NO: 165 - protein, 27 aa, Helicobacter mustelae 12198
QIDHAFPLSRSLDDSQSNKVLCLTSSN

SEQ ID NO: 166 - protein, 27 aa, Mycoplasma mobile 163K
DIDHIVPRSISFDDSFSNLVIVNKLDN

SEQ ID NO: 167 - protein, 27 aa, Mycoplasma ovipneumoniae SC01
EIEHIIPYSMSYDNSQANKILTEKAEN

SEQ ID NO: 168 - protein, 27 aa, Mycoplasma synoviae 53
EIDHVIPYSKSADDSWFNKLLVKKSTN

SEQ ID NO: 169 - protein, 27 aa, Aminomonas paucivorans DSM 12260
EMDHILPYSRSLDNGWHNRVLVHGKDN

SEQ ID NO: 170 - protein, 27 aa, Ruminococcus albus 8
EVDHIVPYSLILDNTINNKALVYAEEN

SEQ ID NO: 171 - protein, 27 aa, Fibrobacter succinogenes
EIEHVIPQSLYFDDSFSNKVICEAEVN

SEQ ID NO: 172 - protein, 27 aa, Bacteroides fragilis, NCTC 9343
DIEHIIPQARLFDDSFSNKTLEARSVN

SEQ ID NO: 173 - protein, 27 aa, Capnocytophaga sputigena
EIEHIVPKARVFDDSFSNKTLTFHRIN

SEQ ID NO: 174 - protein, 28 aa, Finegoldia magna
DKDHIIPQSMKKDDSIINNLVLVNKNAN

SEQ ID NO: 175 - protein, 27 aa, Parvibaculum lavamentivorans DS-1
EVEHIWPRSRSFDNSPRNKTLCRKDVN

SEQ ID NO: 176 - protein, 27 aa, Bacillus cereus
IVNHIIPYNRSFDDTYHNRVLTLTETK

SEQ ID NO: 177 - protein, 27 aa, Prevotella micans
DMEHTIPKSISFDNSDQNLTLCESYYN

SEQ ID NO: 178 - protein, 27 aa, Prevotella ruminicola
DIEHTIPRSAGGDSTKMNLTLCSSRFN

SEQ ID NO: 179 - protein, 27 aa, Flavobacterium columnare
DIEHTIPRSISQDNSQMNKTLCSLKFN

SEQ ID NO: 180 - protein, 27 aa, Rhodospirillum rubrum
DIDHVIPLARGGRDSLDNMVLCQSDAN

SEQ ID NO: 181 - protein, 27 aa, Elusimicrobium minutum Pei191
DIEHLFPIAESEDNGRNNLVISHSACN

SEQ ID NO: 182 - protein, 27 aa, Sphaerochaeta globus str. Buddy
DVDHIFPRDDTADNSYGNKVVAHRQCN

SEQ ID NO: 183 - protein, 27 aa, Nitratifractor salsuginis DSM 16511
DIEHIVPQSLGGLSTDYNTIVTLKSVN

SEQ ID NO: 184 - protein, 27 aa, Acidothermus cellulolyticus 11B
ELDHIVPRTDGGSNRHENLAITCGACN

SEQ ID NO: 185 - protein, 28 aa, Bifidobacterium longum DJO10A
EMDHIVPRKGVGSTNTRTNFAAVCAECN

SEQ ID NO: 186 - protein, 28 aa, Bifidobacterium dentium
EMDHIVPRKGVGSTNTRVNLAAACAACN

SEQ ID NO: 187 - protein, 28 aa, Corynebacterium diphtheriae
EMDHIVPRAGQGSTNTRENLVAVCHRCN

SEQ ID NO: 188 - protein, 33 aa, Sutterella wadsworthensis
EIDHILPRSLIKDARGIVFNAEPNLIYASSRGN

SEQ ID NO: 189 - protein, 33 aa, Gamma proteobacterium HTCC5015
EIDHIIPRSLTGRTKKTVFNSEANLIYCSSKGN

SEQ ID NO: 190 - protein, 33 aa, Parasutterella excrementihominis
EIDHIIPRSLTLKKSESIYNSEVNLIFVSAQGN

SEQ ID NO: 191 - protein, 33 aa, Legionella pneumophila str. Paris
EIDHIYPRSLSKKHFGVIFNSEVNLIYCSSQGN

SEQ ID NO: 192 - protein, 33 aa, Wolinella succinogenes DSM 1740
EIDHILPRSHTLKIYGTVFNPEGNLIYVHQKCN

SEQ ID NO: 193 - protein, 30 aa, Francisella tularensis
ELDHIIPRSHKKYGTLNDEANLICVTRGDN

SEQ ID NO: 194 - protein, 27 aa, Akkermansia muciniphila
ELEHIVPHSFRQSNALSSLVLTWPGVN

SEQ ID NO: 195 - protein, 27 aa, Solobacterium moorei F0204
DIDHIYPRSKIKDDSITNRVLVEKDIN

SEQ ID NO: 196 - protein, 28 aa, Veillonella atypica ACS-134-V-Col7a
YDIDHIYPRSLTKDDSFDNLVLCERTAN

SEQ ID NO: 197 - protein, 28 aa, Fusobacterium nucleatum
DIDHIYPRSKVIKDDSFDNLVLVLKNEN

SEQ ID NO: 198 - protein, 27 aa, Filifactor alocis
DRDHIYPQSKIKDDSIDNLVLVNKTYN

SEQ ID NO: 199 - DNA, 5 bp, Streptococcus thermophilus
  misc_feature (1)..(1): Any nucleotide (e.g., A, G, C, or T)
  misc_feature (4)..(4): Any nucleotide (e.g., A, G, C, or T)
nggng

SEQ ID NO: 200 - DNA, 7 bp, Streptococcus thermophilus
  misc_feature (1)..(1): Any nucleotide (e.g., A, G, C, or T)
  misc_feature (2)..(2): Any nucleotide (e.g., A, G, C, or T)
  misc_feature (7)..(7): A or T
nnagaaw

SEQ ID NO: 201 - DNA, 4 bp, Streptococcus mutans
  misc_feature (1)..(1): Any nucleotide (e.g., A, G, C, or T)
  misc_feature (4)..(4): A or G
naar

SEQ ID NO: 202 - DNA, 5 bp, Staphylococcus aureus
  misc_feature (1)..(1): Any nucleotide (e.g., A, G, C, or T)
  misc_feature (2)..(2): Any nucleotide (e.g., A, G, C, or T)
  misc_feature (4)..(4): A or G
  misc_feature (5)..(5): A or G
nngrr

SEQ ID NO: 203 - DNA, 6 bp, Staphylococcus aureus
  misc_feature (1)..(1): Any nucleotide (e.g., A, G, C, or T)
  misc_feature (2)..(2): Any nucleotide (e.g., A, G, C, or T)
  misc_feature (4)..(4): A or G
  misc_feature (5)..(5): A or G
  misc_feature (6)..(6): Any nucleotide (e.g., A, G, C, or T)
nngrrn

SEQ ID NO: 204 - DNA, 6 bp, Staphylococcus aureus
  misc_feature (1)..(1): Any nucleotide (e.g., A, G, C, or T)
  misc_feature (2)..(2): Any nucleotide (e.g., A, G, C, or T)
  misc_feature (4)..(4): A or G
  misc_feature (5)..(5): A or G
nngrrt

SEQ ID NO: 205 - DNA, 6 bp, Staphylococcus aureus
  misc_feature (1)..(1): Any nucleotide (e.g., A, G, C, or T)
  misc_feature (2)..(2): Any nucleotide (e.g., A, G, C, or T)
  misc_feature (4)..(4): A or G
  misc_feature (5)..(5): A or G
  misc_feature (6)..(6): A, G, or C
nngrrv

SEQ ID NO: 206-325 - skipped (120 entries)

SEQ ID NO: 326 - RNA, 17 nt, Artificial Sequence
  Targeting domain
aaggcuggccaacccau

SEQ ID NO: 327-358 - skipped (32 entries)

SEQ ID NO: 359 - RNA, 20 nt, Artificial Sequence
  Targeting domain
uagucuuagaguauccagug

SEQ ID NO: 360-901 - skipped (542 entries)

SEQ ID NO: 902 - DNA, 4758 bp, Homo sapiens
  misc_feature (2716)..(2719): HPFH deletion site (4 bp del -225 to -222)
  misc_feature (2748)..(2753): GATA1 binding motif
  misc_feature (2762)..(2767): GATA1 binding motif
  misc_feature (2791)..(2799): FKLF transcription factor binding motif
  misc_feature (2823)..(2830): CP1/Coup TFII binding motif
  misc_feature (2824)..(2836): HPFH deletion site (13 bp del -114 to -102)
  misc_feature (2991)..(2993): Start codon
tttaggaagtcaaggtttaggcagggatagccattctattttattaggggcaatactatttccaacggcatctggcttttctcagcccttgtgaggctctacagggaggttgaggtgttagagatcagagcaggaaacaggtttttctttccacggtaactacaatgaagtgatccttactttactaaggaacttttcattttaagtgttgacgcatgcctaaagaggtgaaattaatcccatacccttaagtctacagactggtcacagcatttcaaggaggagacctcattgtaagcttctagggaggtggggacttaggtgaaggaaatgagccagcagaagctcacaagtcagcatcagcgtgtcatgtctcagcagcagaacagcacggtcagatgaaaatatagtgtgaagaatttgtataacattaattgagaaggcagattcactggagttcttatataattgaaagttaatgcacgttaataagcaagagtttagtttaatgtgatggtgttatgaacttaacgcttgtgtctccagaaaattcacatgctgaatccccaactcccaattggctccatttgtgggggaggctttggaaaagtaatcaggtttagaggagctcatgagagcagatccccatcatagaattattttcctcatcagaagcagagagattagccatttctcttccttctggtgaggacacagtgggaagtcagccacctgcaacccaggaagagagccctgaccaggaaccagcagaaaagtgagaaaaaatcctgttgttgaagtcacccagtctatgctattttgttatagcaccttgcactaagtaaggcagatgaagaaagagaaaaaaataagcttcggtgttcagtggattagaaaccatgtttatctcaggtttacaaatctccacttgtcctctgtgtttcagaataaaataccaactctactactctcatctgtaagatgcaaatagtaagcctgagcccttctgtctaactttgaattctattttttcttcaacgtactttaggcttgtaatgtgtttatatacagtgaaatgtcaagttctttctttatatttctttctttcttttttttcctcagcctcagagttttccacatgcccttcctactttcaggaacttctttctccaaacgtcttctgcctggctccatcaaatcataaaggacccacttcaaatgccatcactcactaccatttcacaattcgcactttctttctttgtcctttttttttttagtaaaacaagtttataaaaaattgaaggaataaatgaatggctacttcataggcagagtagacgcaagggctactggttgccgatttttattgttatttttcaatagtatgctaaacaaggggtagattatttatgctgcccatttttagaccataaaagataacttcctgatgttgccatggcatttttttccttttaattttatttcatttcattttaatttcgaaggtacatgtgcaggatgtgcaggcttgttacatgggtaaatgtgtgtctttctggccttttagccatctgtatcaatgagcagatataagctttacacaggatcatgaaggatgaaagaatttcaccaatattataataatttcaatcaacctgatagcttaggggataaactaatttgaagatacagcttgcctccgataagccagaattccagagcttctggcattataatctagcaaggttagagatcatggatcactttcagagaaaaacaaaaacaaactaaccaaaagcaaaacagaaccaaaaaaccaccataaatacttcctaccctgttaatggtccaatatgtcagaaacagcactgtgttagaaataaagctgtctaaagtacactaatattcgagttataatagtgtgtggactattagtcaataaaaacaacccttgcctctttagagttgttttccatgtacacgcacatcttatgtcttagagtaagattccctgagaagtgaacctagcatttatacaagataattaattctaatccacagtacctgccaaagaacattctaccatcatctttactgagcatagaagagctacgccaaaaccctgggtcatcagccagcacacacacttatccagtggtaaatacacatcatctggtgtatacatacatacctgaatatggaatcaaatatttttctaagatgaaacagtcatgatttatttcaaataggtacggataagtagatattgaggtaagcattaggtcttatattatgtaacactaatctattactgcgctgaaactgtggctttatagaaattgttttcactgcactattgagaaattaagagataatggcaaaagtcacaaagagtatattcaaaaagaagtatagcactttttccttagaaaccactgctaactgaaagagactaagatttgtcccgtcaaaaatcctggacctatgcctaaaacacatttcacaatccctgaacttttcaaaaattggtacatgctttagctttaaactacaggcctcactggagctagagacaagaaggtaaaaaacggctgacaaaagaagtcctggtatcctctatgatgggagaaggaaactagctaaagggaagaataaattagagaaaaactggaatgactgaatcggaacaaggcaaaggctataaaaaaaattagcagtatcctcttgggggccccttccccacactatctcaatgcaaatatctgtctgaaacggtccctggctaaactccacccatgggttggccagccttgccttgaccaatagccttgacaaggcaaacttgaccaatagtcttagagtatccagtgaggccaggggccggcggctggctagggatgaagaataaaaggaagcacccttcagcagttccacacactcgcttctggaacgtctgaggttatcaataagctcctagtccagacgccatgggtcatttcacagaggaggacaaggctactatcacaagcctgtggggcaaggtgaatgtggaagatgctggaggagaaaccctgggaaggtaggctctggtgaccaggacaagggagggaaggaaggaccctgtgcctggcaaaagtccaggtcgcttctcaggatttgtggcaccttctgactgtcaaactgttcttgtcaatctcacaggctcctggttgtctacccatggacccagaggttctttgacagctttggcaacctgtcctctgcctctgccatcatgggcaaccccaaagtcaaggcacatggcaagaaggtgctgacttccttgggagatgccacaaagcacctggatgatctcaagggcacctttgcccagctgagtgaactgcactgtgacaagctgcatgtggatcctgagaacttcaaggtgagtccaggagatgtttcagccctgttgcctttagtctcgaggcaacttagacaacggagtattgatctgagcacagcagggtgtgagctgtttgaagatactggggttgggggtgaagaaactgcagaggactaactgggctgagacccagtggtaatgttttagggcctaaggagtgcctctaaaaatctagatggacaattttgactttgagaaaagagaggtggaaatgaggaaaatgacttttctttattagattccagtagaaagaactttcatctttccctcatttttgttgttttaaaacatctatctggaggcaggacaagtatggtcgttaaaaagatgcaggcagaaggcatatattggctcagtcaaagtggggaactttggtggccaaacatacattgctaaggctattcctatatcagctggacacatataaaatgctgctaatgcttcattacaaacttatatcctttaattccagatgggggcaaagtatgtccaggggtgaggaacaattgaaacatttgggctggagtagattttgaaagtcagctctgtgtgtgtgtgtgtgtgtgcgcgcgcgcgtgtgtgtgtgtgtgtcagcgtgtgtttcttttaacgtcttcagcctacaacatacagggttcatggtggcaagaagatagcaagatttaaattatggccagtgactagtgcttgaaggggaacaactacctgcatttaatgggaaggcaaaatctcaggctttgagggaagttaacataggcttgattctgggtggaagcttggtgtgtagttatctggaggccaggctggagctctcagctcactatgggttcatctttattgtctcctttcatctcaacagctcctgggaaatgtgctggtgaccgttttggcaatccatttcggcaaagaattcacccctgaggtgcaggcttcctggcagaagatggtgactgcagtggccagtgccctgtcctccagataccactgagctcactgcccatgattcagagctttcaaggataggctttattctgcaagcaatacaaataataaatctattctgctgagagatcacacatgattttcttcagctcttttttttacatctttttaaatatatgagccacaaagggtttatattgagggaagtgtgtatgtgtatttctgcatgcctgtttgtgtttgtggtgtgtgcatgctcctcatttatttttatatgagatgtgcattttgatgagcaaataaaagcagtaaagacacttgtacacgggagttctgcaagtgggagtaaatggtgtaggagaaatccg

SEQ ID NO: 903 - DNA, 4773 bp, Homo sapiens
  misc_feature (1233)..(1238): GATA1 binding site
  misc_feature (2672)..(2677): GATA1 binding site
  misc_feature (2686)..(2691): GATA1 binding site
  misc_feature (2715)..(2723): FKLF transcription factor binding motif
  misc_feature (2747)..(2754): CP1/Coup TFII binding motif
  misc_feature (2748)..(2760): HPFH deletion site (13 bp del -114 to -102)
  misc_feature (2915)..(2917): Start codon
ttatgtcattaccagagttaaaattctataatggcttctcactccctaccactgaggacaagtttatgtccttaggtttatgcttccctgaaacaataccacctgctattctccactttacatatcaacggcactggttctttatctaactctctggcacagcaggagtttgttttcttctgcttcagagctttgaatttactatttcagcttctaaactttatttggcaatgccttcccatggcagattccttctgtcattttgcctctgttcgaatactttctccttaatttcattcttagttaataatatctgaaattattttgttgtttaacttaattattaattttatgtatgttctacctagattataatcttcagaggaaagttttattctctgacttatttaacttaaatgcccactactttaaaaattatgacatttatttaacagatatttgctgaacaaatgtttgaaaatacatgggaaagaatgcttgaaaacacttgaaattgcttgtgtaaagaaacagttttatcagttaggatttaatcaatgtcagaagcaatgatataggaaaaatcgaggaataagacagttatggataaggagaaatcaacaaactcttaaaagatattgcctcaaaagcataagaggaaataagggtttatacatgacttttagaacactgccttggtttttggataaatggggaagttgtttgaaaacaggagggatcctagatattccttagtctgaggaggagcaattaagattcacttgtttagaggctgggagtggtggctcacgcctgtaatcccagaattttgggaggccaaggcaggcagatcacctgaggtcaagagttcaagaccaacctggccaacatggtgaaatcccatctctacaaaaatacaaaaattagacaggcatgatggcaagtgcctgtaatcccagctacttgggaggctgaggaaggagaattgcttgaacctggaaggcaggagttgcagtgagccgagatcataccactgcactccagcctgggtgacagaacaagactctgtctcaaaaaaaaaaaagagagattcaaaagattcacttgtttaggccttagcgggcttagacaccagtctctgacacattcttaaaggtcaggctctacaaatggaacccaaccagactctcagatatggccaaagatctatacacacccatctcacagatcccctatcttaaagagaccctaatttgggttcacctcagtctctataatctgtaccagcataccaataaaaatctttctcacccatccttagattgagagaagtcacttattattatgtgagtaactggaagatactgataagttgacaaatctttttctttcctttcttattcaacttttattttaacttccaaagaacaagtgcaatatgtgcagctttgttgcgcaggtcaacatgtatctttctggtcttttagccgcctaacactttgagcagatataagccttacacaggattatgaagtctgaaaggattccaccaatattattataattcctatcaacctgataggttaggggaaggtagagctctcctccaataagccagatttccagagtttctgacgtcataatctaccaaggtcatggatcgagttcagagaaaaaacaaaagcaaaaccaaacctaccaaaaaataaaaatcccaaagaaaaaataaagaaaaaaacagcatgaatacttcctgccatgttaagtggccaatatgtcagaaacagcactgagttacagataaagatgtctaaactacagtgacatcccagctgtcacagtgtgtggactattagtcaataaaacagtccctgcctcttaagagttgttttccatgcaaatacatgtcttatgtcttagaataagattccctaagaagtgaacctagcatttatacaagataattaattctaatccatagtatctggtaaagagcattctaccatcatctttaccgagcatagaagagctacaccaaaaccctgggtcatcagccagcacatacacttatccagtgataaatacacatcatcgggtgcctacatacatacctgaatataaaaaaaatacttttgctgagatgaaacaggcgtgatttatttcaaataggtacggataagtagatattgaagtaaggattcagtcttatattatattacataacattaatctattcctgcactgaaactgttgctttataggatttttcactacactaatgagaacttaagagataatggcctaaaaccacagagagtatattcaaagataagtatagcacttcttatttggaaaccaatgcttactaaatgagactaagacgtgtcccatcaaaaatcctggacctatgcctaaaacacatttcacaatccctgaacttttcaaaaattggtacatgctttaactttaaactacaggcctcactggagctacagacaagaaggtgaaaaacggctgacaaaagaagtcctggtatcttctatggtgggagaagaaaactagctaaagggaagaataaattagagaaaaattggaatgactgaatcggaacaaggcaaaggctataaaaaaaattaagcagcagtatcctcttgggggccccttccccacactatctcaatgcaaatatctgtctgaaacggtccctggctaaactccacccatgggttggccagccttgccttgaccaatagccttgacaaggcaaacttgaccaatagtcttagagtatccagtgaggccaggggccggcggctggctagggatgaagaataaaaggaagcacccttcagcagttccacacactcgcttctggaacgtctgaggttatcaataagctcctagtccagacgccatgggtcatttcacagaggaggacaaggctactatcacaagcctgtggggcaaggtgaatgtggaagatgctggaggagaaaccctgggaaggtaggctctggtgaccaggacaagggagggaaggaaggaccctgtgcctggcaaaagtccaggtcgcttctcaggatttgtggcaccttctgactgtcaaactgttcttgtcaatctcacaggctcctggttgtctacccatggacccagaggttctttgacagctttggcaacctgtcctctgcctctgccatcatgggcaaccccaaagtcaaggcacatggcaagaaggtgctgacttccttgggagatgccataaagcacctggatgatctcaagggcacctttgcccagctgagtgaactgcactgtgacaagctgcatgtggatcctgagaacttcaaggtgagtccaggagatgtttcagcactgttgcctttagtctcgaggcaacttagacaactgagtattgatctgagcacagcagggtgtgagctgtttgaagatactggggttgggagtgaagaaactgcagaggactaactgggctgagacccagtggcaatgttttagggcctaaggagtgcctctgaaaatctagatggacaactttgactttgagaaaagagaggtggaaatgaggaaaatgacttttctttattagatttcggtagaaagaactttcacctttcccctatttttgttattcgttttaaaacatctatctggaggcaggacaagtatggtcattaaaaagatgcaggcagaaggcatatattggctcagtcaaagtggggaactttggtggccaaacatacattgctaaggctattcctatatcagctggacacatataaaatgctgctaatgcttcattacaaacttatatcctttaattccagatgggggcaaagtatgtccaggggtgaggaacaattgaaacatttgggctggagtagattttgaaagtcagctctgtgtgtgtgtgtgtgtgtgtgcgcgcgtgtgtttgtgtgtgtgtgagagcgtgtgtttcttttaacgttttcagcctacagcatacagggttcatggtggcaagaagataacaagatttaaattatggccagtgactagtgctgcaagaagaacaactacctgcatttaatgggaaagcaaaatctcaggctttgagggaagttaacataggcttgattctgggtggaagcttggtgtgtagttatctggaggccaggctggagctctcagctcactatgggttcatctttattgtctcctttcatctcaacagctcctgggaaatgtgctggtgaccgttttggcaatccatttcggcaaagaattcacccctgaggtgcaggcttcctggcagaagatggtgactggagtggccagtgccctgtcctccagataccactgagctcactgcccatgatgcagagctttcaaggataggctttattctgcaagcaatcaaataataaatctattctgctaagagatcacacatggttgtcttcagttctttttttatgtctttttaaatatatgagccacaaagggttttatgttgagggatgtgtttatgtgtatttatacatggctatgtgtgtttgtgtcatgtgcacactccacacttttttgtttacgttagatgtgggttttgatgagcaaataaaagaactaggcaataaagaaacttgtacatgggagttctgcaagtgggagtaaaaggtgcaggagaaatctggttggaagaaagacctctataggacaggactcctcagaaacagatgttttggaagagatggggaaaggttcagtgaa

SEQ ID NO: 904-916 - skipped (13 entries)

SEQ ID NO: 917 - DNA, 20 bp, Artificial Sequence
  targeting domain
cttgtcaaggctattggtca

SEQ ID NO: 918-940 - skipped (23 entries)

SEQ ID NO: 941 - RNA, 20 nt, Artificial Sequence
  targeting domain
ggcaaggcuggccaacccau

SEQ ID NO: 942-943 - skipped (2 entries)

SEQ ID NO: 944 - DNA, 20 bp, Artificial Sequence
  targeting domain
ggcaaggctggccaacccat

SEQ ID NO: 945-967 - skipped (23 entries)

SEQ ID NO: 968 - DNA, 115 bp, Artificial Sequence
  +58 DHS enhancer
caactttgaagctagtctagtgcaagctaacagttgcttttatcacaggctccaggaagggtttggcctctgattagggtgggggcgtgggtggggtagaagaggactggcagac

SEQ ID NO: 969 - DNA, 801 bp, Artificial Sequence
  +58 DHS enhancer region including ~500 bp upstream and ~200 bp downstream
aggtaccttttgtgtgtatgtgctgattgagggcccattgagaatattttgacttttagggaagctccaaactctcaaaccacagggatcacaacacatacgtgtgtctgttatgacgttatatgtaagcatcacaacaggcagagaatgtctgcaccccaccctggaaaacagcctgactgtgccccatgggcaaaccagactagtttatagggggttctactctgaggtactgatggaccttgggtgctattcctgtgataaggaaggcagctagacaggacttgggagttatctgtagtgagatggctgaaaagcgatacagggctggctctatgccccaggtgtgcataagtaagagcagatagctgattccagtgcaaagtccatacaggtaataacataggccagaaaagagatatggcatctactcttagacataacacaccagggtcaatacaactttgaagctagtctagtgcaagctaacagttgcttttatcacaggctccaggaagggtttggcctctgattagggtgggggcgtgggtggggtagaagaggactggcagacctctccatcggtggccgtttgcccaggggggcctctttcggaaggctctcttggtgatggagaattggattttatttctcaatgggaatgaaataatttgtatgccatgccgtgtggactcccaaaattgtaaaggaggtgaagcttcccctgtctgcactctcccctcctcataattgtccatttttcatctgtcgggctgtccacccatccatcacatataggca

SEQ ID NO: 970-973 - skipped (4 entries)

SEQ ID NO: 974 - DNA, 180 bp, Artificial Sequence
  Ptx ssODN 18nt - positive strand (OLI16409)
  misc_feature (1)..(2): Linked by phosphorothioate (PS) bond
  misc_feature (179)..(180): Linked by phosphorothioate (PS) bond
ggtgcttccttttattcttcatccctagccagccgccggcccctggcctcactggatactctaagactattggtcaagtttgccttgtcaaggctggccaacccatgggtggagtttagccagggaccgtttcagacagatatttgcattgagatagtgtggggaaggggcccccaagag

SEQ ID NO: 975 - DNA, 180 bp, Artificial Sequence
  Ptx ssODN 18nt - negative strand (OLI16410)
  misc_feature (1)..(2): Linked by phosphorothioate (PS) bond
  misc_feature (179)..(180): Linked by phosphorothioate (PS) bond
ctcttgggggccccttccccacactatctcaatgcaaatatctgtctgaaacggtccctggctaaactccacccatgggttggccagccttgacaaggcaaacttgaccaatagtcttagagtatccagtgaggccaggggccggcggctggctagggatgaagaataaaaggaagcacc

SEQ ID NO: 976 - DNA, 180 bp, Artificial Sequence
  Ptx ssODN 11nt - negative strand (OLI16411)
  misc_feature (1)..(2): Linked by phosphorothioate (PS) bond
  misc_feature (179)..(180): Linked by phosphorothioate (PS) bond
ggccccttccccacactatctcaatgcaaatatctgtctgaaacggtccctggctaaactccacccatgggttggccagccttgccttgagacaaggcaaacttgaccaatagtcttagagtatccagtgaggccaggggccggcggctggctagggatgaagaataaaaggaagcaccc

SEQ ID NO: 977 - DNA, 180 bp, Artificial Sequence
  Ptx ssODN 13nt - negative strand (OLI16412)
  misc_feature (1)..(2): Linked by phosphorothioate (PS) bond
  misc_feature (179)..(180): Linked by phosphorothioate (PS) bond
ggccccttccccacactatctcaatgcaaatatctgtctgaaacggtccctggctaaactccacccatgggttggccagccttgccttgacaaggcaaacttgaccaatagtcttagagtatccagtgaggccaggggccggcggctggctagggatgaagaataaaaggaagcaccctt

SEQ ID NO: 978 - DNA, 180 bp, Artificial Sequence
  Ptx ssODN 11nt - positive strand (OLI16413)
  misc_feature (1)..(2): Linked by phosphorothioate (PS) bond
  misc_feature (179)..(180): Linked by phosphorothioate (PS) bond
gggtgcttccttttattcttcatccctagccagccgccggcccctggcctcactggatactctaagactattggtcaagtttgccttgtctcaaggcaaggctggccaacccatgggtggagtttagccagggaccgtttcagacagatatttgcattgagatagtgtggggaaggggcc

SEQ ID NO: 979 - DNA, 180 bp, Artificial Sequence
  Ptx ssODN 13nt - positive strand (OLI16414)
  misc_feature (1)..(2): Linked by phosphorothioate (PS) bond
  misc_feature (179)..(180): Linked by phosphorothioate (PS) bond
aagggtgcttccttttattcttcatccctagccagccgccggcccctggcctcactggatactctaagactattggtcaagtttgccttgtcaaggcaaggctggccaacccatgggtggagtttagccagggaccgtttcagacagatatttgcattgagatagtgtggggaaggggcc

SEQ ID NO: 980 - DNA, 180 bp, Artificial Sequence
  Ptx ssODN 117G>A - negative strand (OLI16415)
  misc_feature (1)..(2): Linked by phosphorothioate (PS) bond
  misc_feature (179)..(180): Linked by phosphorothioate (PS) bond
ggccccttccccacactatctcaatgcaaatatctgtctgaaacggtccctggctaaactccacccatgggttggccagccttgccttaaccaatagccttgacaaggcaaacttgaccaatagtcttagagtatccagtgaggccaggggccggcggctggctagggatgaagaataaa

SEQ ID NO: 981 - DNA, 180 bp, Artificial Sequence
  Ptx ssODN 117G>A - positive strand (OLI16416)
  misc_feature (1)..(2): Linked by phosphorothioate (PS) bond
  misc_feature (179)..(180): Linked by phosphorothioate (PS) bond
tttattcttcatccctagccagccgccggcccctggcctcactggatactctaagactattggtcaagtttgccttgtcaaggctattggttaaggcaaggctggccaacccatgggtggagtttagccagggaccgtttcagacagatatttgcattgagatagtgtggggaaggggcc

SEQ ID NO: 982 - DNA, 180 bp, Artificial Sequence
  Ptx ssODN 1nt - negative strand (OLI16417)
  misc_feature (1)..(2): Linked by phosphorothioate (PS) bond
  misc_feature (179)..(180): Linked by phosphorothioate (PS) bond
ggccccttccccacactatctcaatgcaaatatctgtctgaaacggtccctggctaaactccacccatgggttggccagccttgccttgccaatagccttgacaaggcaaacttgaccaatagtcttagagtatccagtgaggccaggggccggcggctggctagggatgaagaataaaa

SEQ ID NO: 983 - DNA, 180 bp, Artificial Sequence
  Ptx ssODN 1nt - positive strand (OLI16418)
  misc_feature (1)..(2): Linked by phosphorothioate (PS) bond
  misc_feature (179)..(180): Linked by phosphorothioate (PS) bond
ttttattcttcatccctagccagccgccggcccctggcctcactggatactctaagactattggtcaagtttgccttgtcaaggctattggcaaggcaaggctggccaacccatgggtggagtttagccagggaccgtttcagacagatatttgcattgagatagtgtggggaaggggcc

SEQ ID NO: 984 - DNA, 120 bp, Artificial Sequence
  Ptx ssODN 4nt 40/80 - negative strand (OLI16419)
  misc_feature (1)..(2): Linked by phosphorothioate (PS) bond
  misc_feature (119)..(120): Linked by phosphorothioate (PS) bond
tggctaaactccacccatgggttggccagccttgccttgatagccttgacaaggcaaacttgaccaatagtcttagagtatccagtgaggccaggggccggcggctggctagggatgaag

SEQ ID NO: 985 - DNA, 100 bp, Artificial Sequence
  Ptx ssODN 4nt 30/70 - negative strand (OLI16420)
  misc_feature (1)..(2): Linked by phosphorothioate (PS) bond
  misc_feature (99)..(100): Linked by phosphorothioate (PS) bond
ccacccatgggttggccagccttgccttgatagccttgacaaggcaaacttgaccaatagtcttagagtatccagtgaggccaggggccggcggctggct

SEQ ID NO: 986 - DNA, 100 bp, Artificial Sequence
  Ptx ssODN 4nt - negative strand (OLI16421)
  misc_feature (1)..(2): Linked by phosphorothioate (PS) bond
  misc_feature (99)..(100): Linked by phosphorothioate (PS) bond
aaacggtccctggctaaactccacccatgggttggccagccttgccttgatagccttgacaaggcaaacttgaccaatagtcttagagtatccagtgagg

SEQ ID NO: 987 - DNA, 120 bp, Artificial Sequence
  Ptx ssODN 4nt - negative strand (OLI16422)
  misc_feature (1)..(2): Linked by phosphorothioate (PS) bond
  misc_feature (119)..(120): Linked by phosphorothioate (PS) bond
tatctgtctgaaacggtccctggctaaactccacccatgggttggccagccttgccttgatagccttgacaaggcaaacttgaccaatagtcttagagtatccagtgaggccaggggccg

SEQ ID NO: 988 - DNA, 140 bp, Artificial Sequence
  Ptx ssODN 4nt - negative strand (OLI16423)
  misc_feature (1)..(2): Linked by phosphorothioate (PS) bond
  misc_feature (139)..(140): Linked by phosphorothioate (PS) bond
tcaatgcaaatatctgtctgaaacggtccctggctaaactccacccatgggttggccagccttgccttgatagccttgacaaggcaaacttgaccaatagtcttagagtatccagtgaggccaggggccggcggctggct

SEQ ID NO: 989 - DNA, 180 bp, Artificial Sequence
  Ptx ssODN 4nt - negative strand (OLI16424)
  misc_feature (1)..(2): Linked by phosphorothioate (PS) bond
  misc_feature (179)..(180): Linked by phosphorothioate (PS) bond
ggccccttccccacactatctcaatgcaaatatctgtctgaaacggtccctggctaaactccacccatgggttggccagccttgccttgatagccttgacaaggcaaacttgaccaatagtcttagagtatccagtgaggccaggggccggcggctggctagggatgaagaataaaagga

SEQ ID NO: 990 - DNA, 120 bp, Artificial Sequence
  Ptx ssODN 4nt 40/80 - positive strand (OLI16425)
  misc_feature (1)..(2): Linked by phosphorothioate (PS) bond
  misc_feature (119)..(120): Linked by phosphorothioate (PS) bond
tactctaagactattggtcaagtttgccttgtcaaggctatcaaggcaaggctggccaacccatgggtggagtttagccagggaccgtttcagacagatatttgcattgagatagtgtgg

SEQ ID NO: 991 - DNA, 100 bp, Artificial Sequence
  Ptx ssODN 4nt 30/70 - positive strand (OLI16426)
  misc_feature (1)..(2): Linked by phosphorothioate (PS) bond
  misc_feature (99)..(100): Linked by phosphorothioate (PS) bond
ctattggtcaagtttgccttgtcaaggctatcaaggcaaggctggccaacccatgggtggagtttagccagggaccgtttcagacagatatttgcattga

SEQ ID NO: 992 - DNA, 100 bp, Artificial Sequence
  Ptx ssODN 4nt - positive strand (OLI16427)
  misc_feature (1)..(2): Linked by phosphorothioate (PS) bond
  misc_feature (99)..(100): Linked by phosphorothioate (PS) bond
cctcactggatactctaagactattggtcaagtttgccttgtcaaggctatcaaggcaaggctggccaacccatgggtggagtttagccagggaccgttt

SEQ ID NO: 993 - DNA, 120 bp, Artificial Sequence
  Ptx ssODN 4nt - positive strand (OLI16428)
  misc_feature (1)..(2): Linked by phosphorothioate (PS) bond
  misc_feature (119)..(120): Linked by phosphorothioate (PS) bond
cggcccctggcctcactggatactctaagactattggtcaagtttgccttgtcaaggctatcaaggcaaggctggccaacccatgggtggagtttagccagggaccgtttcagacagata

SEQ ID NO: 994 - DNA, 140 bp, Artificial Sequence
  Ptx ssODN 4nt - positive strand (OLI16429)
  misc_feature (1)..(2): Linked by phosphorothioate (PS) bond
  misc_feature (139)..(140): Linked by phosphorothioate (PS) bond
agccagccgccggcccctggcctcactggatactctaagactattggtcaagtttgccttgtcaaggctatcaaggcaaggctggccaacccatgggtggagtttagccagggaccgtttcagacagatatttgcattga

SEQ ID NO: 995 - DNA, 180 bp, Artificial Sequence
  Ptx ssODN 4nt - positive strand (OLI16430)
  misc_feature (1)..(2): Linked by phosphorothioate (PS) bond
  misc_feature (179)..(180): Linked by phosphorothioate (PS) bond
tccttttattcttcatccctagccagccgccggcccctggcctcactggatactctaagactattggtcaagtttgccttgtcaaggctatcaaggcaaggctggccaacccatgggtggagtttagccagggaccgtttcagacagatatttgcattgagatagtgtggggaaggggcc

SEQ ID NO: 996-999 - skipped (4 entries)

SEQ ID NO: 1000 - protein, 1332 aa, Artificial Sequence
  His-AsCpf1-nNLS
MKHHHHHHMTQFEGFTNLYQVSKTLRFELIPQGKTLKHIQEQGFIEEDKARNDHYKELKPIIDRIYKTYADQCLQLVQLDWENLSAAIDSYRKEKTEETRNALIEEQATYRNAIHDYFIGRTDNLTDAINKRHAEIYKGLFKAELFNGKVLKQLGTVTTTEHENALLRSFDKFTTYFSGFYENRKNVFSAEDISTAIPHRIVQDNFPKFKENCHIFTRLITAVPSLREHFENVKKAIGIFVSTSIEEVFSFPFYNQLLTQTQIDLYNQLLGGISREAGTEKIKGLNEVLNLAIQKNDETAHIIASLPHRFIPLFKQILSDRNTLSFILEEFKSDEEVIQSFCKYKTLLRNENVLETAEALFNELNSIDLTHIFISHKKLETISSALCDHWDTLRNALYERRISELTGKITKSAKEKVQRSLKHEDINLQEIISAAGKELSEAFKQKTSEILSHAHAALDQPLPTTLKKQEEKEILKSQLDSLLGLYHLLDWFAVDESNEVDPEFSARLTGIKLEMEPSLSFYNKARNYATKKPYSVEKFKLNFQMPTLASGWDVNKEKNNGAILFVKNGLYYLGIMPKQKGRYKALSFEPTEKTSEGFDKMYYDYFPDAAKMIPKCSTQLKAVTAHFQTHTTPILLSNNFIEPLEITKEIYDLNNPEKEPKKFQTAYAKKTGDQKGYREALCKWIDFTRDFLSKYTKTTSIDLSSLRPSSQYKDLGEYYAELNPLLYHISFQRIAEKEIMDAVETGKLYLFQIYNKDFAKGHHGKPNLHTLYWTGLFSPENLAKTSIKLNGQAELFYRPKSRMKRMAHRLGEKMLNKKLKDQKTPIPDTLYQELYDYVNHRLSHDLSDEARALLPNVITKEVSHEIIKDRRFTSDKFFFHVPITLNYQAANSPSKFNQRVNAYLKEHPETPIIGIDRGERNLIYITVIDSTGKILEQRSLNTIQQFDYQKKLDNREKERVAARQAWSVVGTIKDLKQGYLSQVIHEIVDLMIHYQAVVVLENLNFGFKSKRTGIAEKAVYQQFEKMLIDKLNCLVLKDYPAEKVGGVLNPYQLTDQFTSFAKMGTQSGFLFYVPAPYTSKIDPLTGFVDPFVWKTIKNHESRKHFLEGFDFLHYDVKTGDFILHFKMNRNLSFQRGLPGFMPAWDIVFEKNETQFDAKGTPFIAGKRIVPVIENHRFTGRYRDLYPANELIALLEEKGIVFRDGSNILPKLLENDDSHAIDTMVALIRSVLQMRNSNAATGEDYINSPVRDLNGVCFDSRFQNPEWPMDADANGAYHIALKGQLLLNHLKESKDLKLQNGISNQDWLAYIQELRNKRPAATKKAGQAKKKKG

SEQ ID NO: 1001 - protein, 1333 aa, Artificial Sequence
  His-AsCpf1-sNLS-sNLS
MKHHHHHHMTQFEGFTNLYQVSKTLRFELIPQGKTLKHIQEQGFIEEDKARNDHYKELKPIIDRIYKTYADQCLQLVQLDWENLSAAIDSYRKEKTEETRNALIEEQATYRNAIHDYFIGRTDNLTDAINKRHAEIYKGLFKAELFNGKVLKQLGTVTTTEHENALLRSFDKFTTYFSGFYENRKNVFSAEDISTAIPHRIVQDNFPKFKENCHIFTRLITAVPSLREHFENVKKAIGIFVSTSIEEVFSFPFYNQLLTQTQIDLYNQLLGGISREAGTEKIKGLNEVLNLAIQKNDETAHIIASLPHRFIPLFKQILSDRNTLSFILEEFKSDEEVIQSFCKYKTLLRNENVLETAEALFNELNSIDLTHIFISHKKLETISSALCDHWDTLRNALYERRISELTGKITKSAKEKVQRSLKHEDINLQEIISAAGKELSEAFKQKTSEILSHAHAALDQPLPTTLKKQEEKEILKSQLDSLLGLYHLLDWFAVDESNEVDPEFSARLTGIKLEMEPSLSFYNKARNYATKKPYSVEKFKLNFQMPTLASGWDVNKEKNNGAILFVKNGLYYLGIMPKQKGRYKALSFEPTEKTSEGFDKMYYDYFPDAAKMIPKCSTQLKAVTAHFQTHTTPILLSNNFIEPLEITKEIYDLNNPEKEPKKFQTAYAKKTGDQKGYREALCKWIDFTRDFLSKYTKTTSIDLSSLRPSSQYKDLGEYYAELNPLLYHISFQRIAEKEIMDAVETGKLYLFQIYNKDFAKGHHGKPNLHTLYWTGLFSPENLAKTSIKLNGQAELFYRPKSRMKRMAHRLGEKMLNKKLKDQKTPIPDTLYQELYDYVNHRLSHDLSDEARALLPNVITKEVSHEIIKDRRFTSDKFFFHVPITLNYQAANSPSKFNQRVNAYLKEHPETPIIGIDRGERNLIYITVIDSTGKILEQRSLNTIQQFDYQKKLDNREKERVAARQAWSVVGTIKDLKQGYLSQVIHEIVDLMIHYQAVVVLENLNFGFKSKRTGIAEKAVYQQFEKMLIDKLNCLVLKDYPAEKVGGVLNPYQLTDQFTSFAKMGTQSGFLFYVPAPYTSKIDPLTGFVDPFVWKTIKNHESRKHFLEGFDFLHYDVKTGDFILHFKMNRNLSFQRGLPGFMPAWDIVFEKNETQFDAKGTPFIAGKRIVPVIENHRFTGRYRDLYPANELIALLEEKGIVFRDGSNILPKLLENDDSHAIDTMVALIRSVLQMRNSNAATGEDYINSPVRDLNGVCFDSRFQNPEWPMDADANGAYHIALKGQLLLNHLKESKDLKLQNGISNQDWLAYIQELRNGSPKKKRKVGSPKKKRKV

SEQ ID NO: 1002 - RNA, 20 nt, Artificial Sequence
  HBG1-1 gRNA (OLI13620) targeting domain
ccuugucaaggcuauugguc

SEQ ID NO: 1003 - DNA, 20 bp, Artificial Sequence
  HBG1-1 gRNA (OLI13620) targeting domain
ccttgtcaaggctattggtc

SEQ ID NO: 1004 - RNA, 24 nt, Artificial Sequence
  HBG1-1 gRNA (OLI13620) targeting domain plus PAM
uuugccuugucaaggcuauugguc

SEQ ID NO: 1005 - DNA, 24 bp, Artificial Sequence
  HBG1-1 gRNA (OLI13620) targeting domain plus PAM
tttgccttgtcaaggctattggtc

SEQ ID NO: 1006 - protein, 16 aa, Artificial Sequence
  Nucleoplasmin NLS
KRPAATKKAGQAKKKK

SEQ ID NO: 1007 - protein, 7 aa, Artificial Sequence
  Simian Virus 40 NLS
PKKKRKV

SEQ ID NO: 1008 - protein, 1324 aa, Artificial Sequence
  His-AsCpf1-sNLS
  MISC_FEATURE (3)..(8): His tag
  MISC_FEATURE (1318)..(1324): SV40 NLS
MKHHHHHHMTQFEGFTNLYQVSKTLRFELIPQGKTLKHIQEQGFIEEDKARNDHYKELKPIIDRIYKTYADQCLQLVQLDWENLSAAIDSYRKEKTEETRNALIEEQATYRNAIHDYFIGRTDNLTDAINKRHAEIYKGLFKAELFNGKVLKQLGTVTTTEHENALLRSFDKFTTYFSGFYENRKNVFSAEDISTAIPHRIVQDNFPKFKENCHIFTRLITAVPSLREHFENVKKAIGIFVSTSIEEVFSFPFYNQLLTQTQIDLYNQLLGGISREAGTEKIKGLNEVLNLAIQKNDETAHIIASLPHRFIPLFKQILSDRNTLSFILEEFKSDEEVIQSFCKYKTLLRNENVLETAEALFNELNSIDLTHIFISHKKLETISSALCDHWDTLRNALYERRISELTGKITKSAKEKVQRSLKHEDINLQEIISAAGKELSEAFKQKTSEILSHAHAALDQPLPTTLKKQEEKEILKSQLDSLLGLYHLLDWFAVDESNEVDPEFSARLTGIKLEMEPSLSFYNKARNYATKKPYSVEKFKLNFQMPTLASGWDVNKEKNNGAILFVKNGLYYLGIMPKQKGRYKALSFEPTEKTSEGFDKMYYDYFPDAAKMIPKCSTQLKAVTAHFQTHTTPILLSNNFIEPLEITKEIYDLNNPEKEPKKFQTAYAKKTGDQKGYREALCKWIDFTRDFLSKYTKTTSIDLSSLRPSSQYKDLGEYYAELNPLLYHISFQRIAEKEIMDAVETGKLYLFQIYNKDFAKGHHGKPNLHTLYWTGLFSPENLAKTSIKLNGQAELFYRPKSRMKRMAHRLGEKMLNKKLKDQKTPIPDTLYQELYDYVNHRLSHDLSDEARALLPNVITKEVSHEIIKDRRFTSDKFFFHVPITLNYQAANSPSKFNQRVNAYLKEHPETPIIGIDRGERNLIYITVIDSTGKILEQRSLNTIQQFDYQKKLDNREKERVAARQAWSVVGTIKDLKQGYLSQVIHEIVDLMIHYQAVVVLENLNFGFKSKRTGIAEKAVYQQFEKMLIDKLNCLVLKDYPAEKVGGVLNPYQLTDQFTSFAKMGTQSGFLFYVPAPYTSKIDPLTGFVDPFVWKTIKNHESRKHFLEGFDFLHYDVKTGDFILHFKMNRNLSFQRGLPGFMPAWDIVFEKNETQFDAKGTPFIAGKRIVPVIENHRFTGRYRDLYPANELIALLEEKGIVFRDGSNILPKLLENDDSHAIDTMVALIRSVLQMRNSNAATGEDYINSPVRDLNGVCFDSRFQNPEWPMDADANGAYHIALKGQLLLNHLKESKDLKLQNGISNQDWLAYIQELRNGSPKKKRKV

SEQ ID NO: 1009 - protein, 1326 aa, Artificial Sequence
  His-sNLS-AsCpf1
  MISC_FEATURE (3)..(8): His tag
  MISC_FEATURE (11)..(17): SV40 NLS
MKHHHHHHGSPKKKRKVGSMTQFEGFTNLYQVSKTLRFELIPQGKTLKHIQEQGFIEEDKARNDHYKELKPIIDRIYKTYADQCLQLVQLDWENLSAAIDSYRKEKTEETRNALIEEQATYRNAIHDYFIGRTDNLTDAINKRHAEIYKGLFKAELFNGKVLKQLGTVTTTEHENALLRSFDKFTTYFSGFYENRKNVFSAEDISTAIPHRIVQDNFPKFKENCHIFTRLITAVPSLREHFENVKKAIGIFVSTSIEEVFSFPFYNQLLTQTQIDLYNQLLGGISREAGTEKIKGLNEVLNLAIQKNDETAHIIASLPHRFIPLFKQILSDRNTLSFILEEFKSDEEVIQSFCKYKTLLRNENVLETAEALFNELNSIDLTHIFISHKKLETISSALCDHWDTLRNALYERRISELTGKITKSAKEKVQRSLKHEDINLQEIISAAGKELSEAFKQKTSEILSHAHAALDQPLPTTLKKQEEKEILKSQLDSLLGLYHLLDWFAVDESNEVDPEFSARLTGIKLEMEPSLSFYNKARNYATKKPYSVEKFKLNFQMPTLASGWDVNKEKNNGAILFVKNGLYYLGIMPKQKGRYKALSFEPTEKTSEGFDKMYYDYFPDAAKMIPKCSTQLKAVTAHFQTHTTPILLSNNFIEPLEITKEIYDLNNPEKEPKKFQTAYAKKTGDQKGYREALCKWIDFTRDFLSKYTKTTSIDLSSLRPSSQYKDLGEYYAELNPLLYHISFQRIAEKEIMDAVETGKLYLFQIYNKDFAKGHHGKPNLHTLYWTGLFSPENLAKTSIKLNGQAELFYRPKSRMKRMAHRLGEKMLNKKLKDQKTPIPDTLYQELYDYVNHRLSHDLSDEARALLPNVITKEVSHEIIKDRRFTSDKFFFHVPITLNYQAANSPSKFNQRVNAYLKEHPETPIIGIDRGERNLIYITVIDSTGKILEQRSLNTIQQFDYQKKLDNREKERVAARQAWSVVGTIKDLKQGYLSQVIHEIVDLMIHYQAVVVLENLNFGFKSKRTGIAEKAVYQQFEKMLIDKLNCLVLKDYPAEKVGGVLNPYQLTDQFTSFAKMGTQSGFLFYVPAPYTSKIDPLTGFVDPFVWKTIKNHESRKHFLEGFDFLHYDVKTGDFILHFKMNRNLSFQRGLPGFMPAWDIVFEKNETQFDAKGTPFIAGKRIVPVIENHRFTGRYRDLYPANELIALLEEKGIVFRDGSNILPKLLENDDSHAIDTMVALIRSVLQMRNSNAATGEDYINSPVRDLNGVCFDSRFQNPEWPMDADANGAYHIALKGQLLLNHLKESKDLKLQNGISNQDWLAYIQELRN

SEQ ID NO: 1010 - protein, 1333 aa, Artificial Sequence
  His-sNLS-sNLS-AsCpf1
  MISC_FEATURE (3)..(8): His tag
  MISC_FEATURE (11)..(17): SV40 NLS
  MISC_FEATURE (20)..(26): SV40 NLS
MKHHHHHHGSPKKKRKVGSPKKKRKVMTQFEGFTNLYQVSKTLRFELIPQGKTLKHIQEQGFIEEDKARNDHYKELKPIIDRIYKTYADQCLQLVQLDWENLSAAIDSYRKEKTEETRNALIEEQATYRNAIHDYFIGRTDNLTDAINKRHAEIYKGLFKAELFNGKVLKQLGTVTTTEHENALLRSFDKFTTYFSGFYENRKNVFSAEDISTAIPHRIVQDNFPKFKENCHIFTRLITAVPSLREHFENVKKAIGIFVSTSIEEVFSFPFYNQLLTQTQIDLYNQLLGGISREAGTEKIKGLNEVLNLAIQKNDETAHIIASLPHRFIPLFKQILSDRNTLSFILEEFKSDEEVIQSFCKYKTLLRNENVLETAEALFNELNSIDLTHIFISHKKLETISSALCDHWDTLRNALYERRISELTGKITKSAKEKVQRSLKHEDINLQEIISAAGKELSEAFKQKTSEILSHAHAALDQPLPTTLKKQEEKEILKSQLDSLLGLYHLLDWFAVDESNEVDPEFSARLTGIKLEMEPSLSFYNKARNYATKKPYSVEKFKLNFQMPTLASGWDVNKEKNNGAILFVKNGLYYLGIMPKQKGRYKALSFEPTEKTSEGFDKMYYDYFPDAAKMIPKCSTQLKAVTAHFQTHTTPILLSNNFIEPLEITKEIYDLNNPEKEPKKFQTAYAKKTGDQKGYREALCKWIDFTRDFLSKYTKTTSIDLSSLRPSSQYKDLGEYYAELNPLLYHISFQRIAEKEIMDAVETGKLYLFQIYNKDFAKGHHGKPNLHTLYWTGLFSPENLAKTSIKLNGQAELFYRPKSRMKRMAHRLGEKMLNKKLKDQKTPIPDTLYQELYDYVNHRLSHDLSDEARALLPNVITKEVSHEIIKDRRFTSDKFFFHVPITLNYQAANSPSKFNQRVNAYLKEHPETPIIGIDRGERNLIYITVIDSTGKILEQRSLNTIQQFDYQKKLDNREKERVAARQAWSVVGTIKDLKQGYLSQVIHEIVDLMIHYQAVVVLENLNFGFKSKRTGIAEKAVYQQFEKMLIDKLNCLVLKDYPAEKVGGVLNPYQLTDQFTSFAKMGTQSGFLFYVPAPYTSKIDPLTGFVDPFVWKTIKNHESRKHFLEGFDFLHYDVKTGDFILHFKMNRNLSFQRGLPGFMPAWDIVFEKNETQFDAKGTPFIAGKRIVPVIENHRFTGRYRDLYPANELIALLEEKGIVFRDGSNILPKLLENDDSHAIDTMVALIRSVLQMRNSNAATGEDYINSPVRDLNGVCFDSRFQNPEWPMDADANGAYHIALKGQLLLNHLKESKDLKLQNGISNQDWLAYIQELRN

SEQ ID NO: 1011 - protein, 1327 aa, Artificial Sequence
  sNLS-sNLS-AsCpf1
  MISC_FEATURE (5)..(11): SV40 NLS
  MISC_FEATURE (14)..(20): SV40 NLS
MKGSPKKKRKVGSPKKKRKVMTQFEGFTNLYQVSKTLRFELIPQGKTLKHIQEQGFIEEDKARNDHYKELKPIIDRIYKTYADQCLQLVQLDWENLSAAIDSYRKEKTEETRNALIEEQATYRNAIHDYFIGRTDNLTDAINKRHAEIYKGLFKAELFNGKVLKQLGTVTTTEHENALLRSFDKFTTYFSGFYENRKNVFSAEDISTAIPHRIVQDNFPKFKENCHIFTRLITAVPSLREHFENVKKAIGIFVSTSIEEVFSFPFYNQLLTQTQIDLYNQLLGGISREAGTEKIKGLNEVLNLAIQKNDETAHIIASLPHRFIPLFKQILSDRNTLSFILEEFKSDEEVIQSFCKYKTLLRNENVLETAEALFNELNSIDLTHIFISHKKLETISSALCDHWDTLRNALYERRISELTGKITKSAKEKVQRSLKHEDINLQEIISAAGKELSEAFKQKTSEILSHAHAALDQPLPTTLKKQEEKEILKSQLDSLLGLYHLLDWFAVDESNEVDPEFSARLTGIKLEMEPSLSFYNKARNYATKKPYSVEKFKLNFQMPTLASGWDVNKEKNNGAILFVKNGLYYLGIMPKQKGRYKALSFEPTEKTSEGFDKMYYDYFPDAAKMIPKCSTQLKAVTAHFQTHTTPILLSNNFIEPLEITKEIYDLNNPEKEPKKFQTAYAKKTGDQKGYREALCKWIDFTRDFLSKYTKTTSIDLSSLRPSSQYKDLGEYYAELNPLLYHISFQRIAEKEIMDAVETGKLYLFQIYNKDFAKGHHGKPNLHTLYWTGLFSPENLAKTSIKLNGQAELFYRPKSRMKRMAHRLGEKMLNKKLKDQKTPIPDTLYQELYDYVNHRLSHDLSDEARALLPNVITKEVSHEIIKDRRFTSDKFFFHVPITLNYQAANSPSKFNQRVNAYLKEHPETPIIGIDRGERNLIYITVIDSTGKILEQRSLNTIQQFDYQKKLDNREKERVAARQAWSVVGTIKDLKQGYLSQVIHEIVDLMIHYQAVVVLENLNFGFKSKRTGIAEKAVYQQFEKMLIDKLNCLVLKDYPAEKVGGVLNPYQLTDQFTSFAKMGTQSGFLFYVPAPYTSKIDPLTGFVDPFVWKTIKNHESRKHFLEGFDFLHYDVKTGDFILHFKMNRNLSFQRGLPGFMPAWDIVFEKNETQFDAKGTPFIAGKRIVPVIENHRFTGRYRDLYPANELIALLEEKGIVFRDGSNILPKLLENDDSHAIDTMVALIRSVLQMRNSNAATGEDYINSPVRDLNGVCFDSRFQNPEWPMDADANGAYHIALKGQLLLNHLKESKDLKLQNGISNQDWLAYIQELRN

SEQ ID NO: 1012 - protein, 1332 aa, Artificial Sequence
  His-sNLS-AsCpf1-sNLS
  MISC_FEATURE (3)..(8): His tag
  MISC_FEATURE (10)..(16): SV40 NLS
  MISC_FEATURE (1325)..(1331): SV40 NLS
MKHHHHHHMPKKKRKVMTQFEGFTNLYQVSKTLRFELIPQGKTLKHIQEQGFIEEDKARNDHYKELKPIIDRIYKTYADQCLQLVQLDWENLSAAIDSYRKEKTEETRNALIEEQATYRNAIHDYFIGRTDNLTDAINKRHAEIYKGLFKAELFNGKVLKQLGTVTTTEHENALLRSFDKFTTYFSGFYENRKNVFSAEDISTAIPHRIVQDNFPKFKENCHIFTRLITAVPSLREHFENVKKAIGIFVSTSIEEVFSFPFYNQLLTQTQIDLYNQLLGGISREAGTEKIKGLNEVLNLAIQKNDETAHIIASLPHRFIPLFKQILSDRNTLSFILEEFKSDEEVIQSFCKYKTLLRNENVLETAEALFNELNSIDLTHIFISHKKLETISSALCDHWDTLRNALYERRISELTGKITKSAKEKVQRSLKHEDINLQEIISAAGKELSEAFKQKTSEILSHAHAALDQPLPTTLKKQEEKEILKSQLDSLLGLYHLLDWFAVDESNEVDPEFSARLTGIKLEMEPSLSFYNKARNYATKKPYSVEKFKLNFQMPTLASGWDVNKEKNNGAILFVKNGLYYLGIMPKQKGRYKALSFEPTEKTSEGFDKMYYDYFPDAAKMIPKCSTQLKAVTAHFQTHTTPILLSNNFIEPLEITKEIYDLNNPEKEPKKFQTAYAKKTGDQKGYREALCKWIDFTRDFLSKYTKTTSIDLSSLRPSSQYKDLGEYYAELNPLLYHISFQRIAEKEIMDAVETGKLYLFQIYNKDFAKGHHGKPNLHTLYWTGLFSPENLAKTSIKLNGQAELFYRPKSRMKRMAHRLGEKMLNKKLKDQKTPIPDTLYQELYDYVNHRLSHDLSDEARALLPNVITKEVSHEIIKDRRFTSDKFFFHVPITLNYQAANSPSKFNQRVNAYLKEHPETPIIGIDRGERNLIYITVIDSTGKILEQRSLNTIQQFDYQKKLDNREKERVAARQAWSVVGTIKDLKQGYLSQVIHEIVDLMIHYQAVVVLENLNFGFKSKRTGIAEKAVYQQFEKMLIDKLNCLVLKDYPAEKVGGVLNPYQLTDQFTSFAKMGTQSGFLFYVPAPYTSKIDPLTGFVDPFVWKTIKNHESRKHFLEGFDFLHYDVKTGDFILHFKMNRNLSFQRGLPGFMPAWDIVFEKNETQFDAKGTPFIAGKRIVPVIENHRFTGRYRDLYPANELIALLEEKGIVFRDGSNILPKLLENDDSHAIDTMVALIRSVLQMRNSNAATGEDYINSPVRDLNGVCFDSRFQNPEWPMDADANGAYHIALKGQLLLNHLKESKDLKLQNGISNQDWLAYIQELRNGPKKKRKVG

SEQ ID NO: 1013 - protein, 1352 aa, Artificial Sequence
  His-sNLS-sNLS-AsCpf1-sNLS-sNLS
  MISC_FEATURE (3)..(8): His tag
  MISC_FEATURE (11)..(17): SV40 NLS
  MISC_FEATURE (20)..(26): SV40 NLS
  MISC_FEATURE (1337)..(1343): SV40 NLS
  MISC_FEATURE (1346)..(1352): SV40 NLS
MGHHHHHHGSPKKKRKVGSPKKKRKVGSTQFEGFTNLYQVSKTLRFELIPQGKTLKHIQEQGFIEEDKARNDHYKELKPIIDRIYKTYADQCLQLVQLDWENLSAAIDSYRKEKTEETRNALIEEQATYRNAIHDYFIGRTDNLTDAINKRHAEIYKGLFKAELFNGKVLKQLGTVTTTEHENALLRSFDKFTTYFSGFYENRKNVFSAEDISTAIPHRIVQDNFPKFKENCHIFTRLITAVPSLREHFENVKKAIGIFVSTSIEEVFSFPFYNQLLTQTQIDLYNQLLGGISREAGTEKIKGLNEVLNLAIQKNDETAHIIASLPHRFIPLFKQILSDRNTLSFILEEFKSDEEVIQSFCKYKTLLRNENVLETAEALFNELNSIDLTHIFISHKKLETISSALCDHWDTLRNALYERRISELTGKITKSAKEKVQRSLKHEDINLQEIISAAGKELSEAFKQKTSEILSHAHAALDQPLPTTLKKQEEKEILKSQLDSLLGLYHLLDWFAVDESNEVDPEFSARLTGIKLEMEPSLSFYNKARNYATKKPYSVEKFKLNFQMPTLASGWDVNKEKNNGAILFVKNGLYYLGIMPKQKGRYKALSFEPTEKTSEGFDKMYYDYFPDAAKMIPKCSTQLKAVTAHFQTHTTPILLSNNFIEPLEITKEIYDLNNPEKEPKKFQTAYAKKTGDQKGYREALCKWIDFTRDFLSKYTKTTSIDLSSLRPSSQYKDLGEYYAELNPLLYHISFQRIAEKEIMDAVETGKLYLFQIYNKDFAKGHHGKPNLHTLYWTGLFSPENLAKTSIKLNGQAELFYRPKSRMKRMAARLGEKMLNKKLKDQKTPIPDTLYQELYDYVNHRLSHDLSDEARALLPNVITKEVSHEIIKDRRFTSDKFFFHVPITLNYQAANSPSKFNQRVNAYLKEHPETPIIGIDRGERNLIYITVIDSTGKILEQRSLNTIQQFDYQKKLDNREKERVAARQAWSVVGTIKDLKQGYLSQVIHEIVDLMIHYQAVVVLENLNFGFKSKRTGIAEKAVYQQFEKMLIDKLNCLVLKDYPAEKVGGVLNPYQLTDQFTSFAKMGTQSGFLFYVPAPYTSKIDPLTGFVDPFVWKTIKNHESRKHFLEGFDFLHYDVKTGDFILHFKMNRNLSFQRGLPGFMPAWDIVFEKNETQFDAKGTPFIAGKRIVPVIENHRFTGRYRDLYPANELIALLEEKGIVFRDGSNILPKLLENDDSHAIDTMVALIRSVLQMRNSNAATGEDYINSPVRDLNGVCFDSRFQNPEWPMDADANGAYHIALKGQLLLNHLKESKDLKLQNGISNQDWLAYIQELRNGSPKKKRKVGSPKKKRKV

SEQ ID NO: 1014 - protein, 1332 aa, Artificial Sequence
  His-AsCpf1-nNLS Cys-less
  MISC_FEATURE (3)..(8): His tag
  MISC_FEATURE (1316)..(1331): Nucleoplasmin NLS
MKHHHHHHMTQFEGFTNLYQVSKTLRFELIPQGKTLKHIQEQGFIEEDKARNDHYKELKPIIDRIYKTYADQSLQLVQLDWENLSAAIDSYRKEKTEETRNALIEEQATYRNAIHDYFIGRTDNLTDAINKRHAEIYKGLFKAELFNGKVLKQLGTVTTTEHENALLRSFDKFTTYFSGFYENRKNVFSAEDISTAIPHRIVQDNFPKFKENSHIFTRLITAVPSLREHFENVKKAIGIFVSTSIEEVFSFPFYNQLLTQTQIDLYNQLLGGISREAGTEKIKGLNEVLNLAIQKNDETAHIIASLPHRFIPLFKQILSDRNTLSFILEEFKSDEEVIQSFSKYKTLLRNENVLETAEALFNELNSIDLTHIFISHKKLETISSALSDHWDTLRNALYERRISELTGKITKSAKEKVQRSLKHEDINLQEIISAAGKELSEAFKQKTSEILSHAHAALDQPLPTTLKKQEEKEILKSQLDSLLGLYHLLDWFAVDESNEVDPEFSARLTGIKLEMEPSLSFYNKARNYATKKPYSVEKFKLNFQMPTLASGWDVNKEKNNGAILFVKNGLYYLGIMPKQKGRYKALSFEPTEKTSEGFDKMYYDYFPDAAKMIPKSSTQLKAVTAHFQTHTTPILLSNNFIEPLEITKEIYDLNNPEKEPKKFQTAYAKKTGDQKGYREALSKWIDFTRDFLSKYTKTTSIDLSSLRPSSQYKDLGEYYAELNPLLYHISFQRIAEKEIMDAVETGKLYLFQIYNKDFAKGHHGKPNLHTLYWTGLFSPENLAKTSIKLNGQAELFYRPKSRMKRMAHRLGEKMLNKKLKDQKTPIPDTLYQELYDYVNHRLSHDLSDEARALLPNVITKEVSHEIIKDRRFTSDKFFFHVPITLNYQAANSPSKFNQRVNAYLKEHPETPIIGIDRGERNLIYITVIDSTGKILEQRSLNTIQQFDYQKKLDNREKERVAARQAWSVVGTIKDLKQGYLSQVIHEIVDLMIHYQAVVVLENLNFGFKSKRTGIAEKAVYQQFEKMLIDKLNSLVLKDYPAEKVGGVLNPYQLTDQFTSFAKMGTQSGFLFYVPAPYTSKIDPLTGFVDPFVWKTIKNHESRKHFLEGFDFLHYDVKTGDFILHFKMNRNLSFQRGLPGFMPAWDIVFEKNETQFDAKGTPFIAGKRIVPVIENHRFTGRYRDLYPANELIALLEEKGIVFRDGSNILPKLLENDDSHAIDTMVALIRSVLQMRNSNAATGEDYINSPVRDLNGVSFDSRFQNPEWPMDADANGAYHIALKGQLLLNHLKESKDLKLQNGISNQDWLAYIQELRNKRPAATKKAGQAKKKKG

SEQ ID NO: 1015 - protein, 1332 aa, Artificial Sequence
  His-AsCpf1-nNLS Cys-low
  MISC_FEATURE (3)..(8): His tag
  MISC_FEATURE (1316)..(1331): Nucleoplasmin NLS
MKHHHHHHMTQFEGFTNLYQVSKTLRFELIPQGKTLKHIQEQGFIEEDKARNDHYKELKPIIDRIYKTYADQCLQLVQLDWENLSAAIDSYRKEKTEETRNALIEEQATYRNAIHDYFIGRTDNLTDAINKRHAEIYKGLFKAELFNGKVLKQLGTVTTTEHENALLRSFDKFTTYFSGFYENRKNVFSAEDISTAIPHRIVQDNFPKFKENCHIFTRLITAVPSLREHFENVKKAIGIFVSTSIEEVFSFPFYNQLLTQTQIDLYNQLLGGISREAGTEKIKGLNEVLNLAIQKNDETAHIIASLPHRFIPLFKQILSDRNTLSFILEEFKSDEEVIQSFSKYKTLLRNENVLETAEALFNELNSIDLTHIFISHKKLETISSALSDHWDTLRNALYERRISELTGKITKSAKEKVQRSLKHEDINLQEIISAAGKELSEAFKQKTSEILSHAHAALDQPLPTTLKKQEEKEILKSQLDSLLGLYHLLDWFAVDESNEVDPEFSARLTGIKLEMEPSLSFYNKARNYATKKPYSVEKFKLNFQMPTLASGWDVNKEKNNGAILFVKNGLYYLGIMPKQKGRYKALSFEPTEKTSEGFDKMYYDYFPDAAKMIPKCSTQLKAVTAHFQTHTTPILLSNNFIEPLEITKEIYDLNNPEKEPKKFQTAYAKKTGDQKGYREALSKWIDFTRDFLSKYTKTTSIDLSSLRPSSQYKDLGEYYAELNPLLYHISFQRIAEKEIMDAVETGKLYLFQIYNKDFAKGHHGKPNLHTLYWTGLFSPENLAKTSIKLNGQAELFYRPKSRMKRMAHRLGEKMLNKKLKDQKTPIPDTLYQELYDYVNHRLSHDLSDEARALLPNVITKEVSHEIIKDRRFTSDKFFFHVPITLNYQAANSPSKFNQRVNAYLKEHPETPIIGIDRGERNLIYITVIDSTGKILEQRSLNTIQQFDYQKKLDNREKERVAARQAWSVVGTIKDLKQGYLSQVIHEIVDLMIHYQAVVVLENLNFGFKSKRTGIAEKAVYQQFEKMLIDKLNCLVLKDYPAEKVGGVLNPYQLTDQFTSFAKMGTQSGFLFYVPAPYTSKIDPLTGFVDPFVWKTIKNHESRKHFLEGFDFLHYDVKTGDFILHFKMNRNLSFQRGLPGFMPAWDIVFEKNETQFDAKGTPFIAGKRIVPVIENHRFTGRYRDLYPANELIALLEEKGIVFRDGSNILPKLLENDDSHAIDTMVALIRSVLQMRNSNAATGEDYINSPVRDLNGVCFDSRFQNPEWPMDADANGAYHIALKGQLLLNHLKESKDLKLQNGISNQDWLAYIQELRNKRPAATKKAGQAKKKKG

SEQ ID NO: 1016 - protein, 1307 aa, Acidaminococcus sp. strain BV3L6
MTQFEGFTNLYQVSKTLRFELIPQGKTLKHIQEQGFIEEDKARNDHYKELKPIIDRIYKTYADQCLQLVQLDWENLSAAIDSYRKEKTEETRNALIEEQATYRNAIHDYFIGRTDNLTDAINKRHAEIYKGLFKAELFNGKVLKQLGTVTTTEHENALLRSFDKFTTYFSGFYENRKNVFSAEDISTAIPHRIVQDNFPKFKENCHIFTRLITAVPSLREHFENVKKAIGIFVSTSIEEVFSFPFYNQLLTQTQIDLYNQLLGGISREAGTEKIKGLNEVLNLAIQKNDETAHIIASLPHRFIPLFKQILSDRNTLSFILEEFKSDEEVIQSFCKYKTLLRNENVLETAEALFNELNSIDLTHIFISHKKLETISSALCDHWDTLRNALYERRISELTGKITKSAKEKVQRSLKHEDINLQEIISAAGKELSEAFKQKTSEILSHAHAALDQPLPTTLKKQEEKEILKSQLDSLLGLYHLLDWFAVDESNEVDPEFSARLTGIKLEMEPSLSFYNKARNYATKKPYSVEKFKLNFQMPTLASGWDVNKEKNNGAILFVKNGLYYLGIMPKQKGRYKALSFEPTEKTSEGFDKMYYDYFPDAAKMIPKCSTQLKAVTAHFQTHTTPILLSNNFIEPLEITKEIYDLNNPEKEPKKFQTAYAKKTGDQKGYREALCKWIDFTRDFLSKYTKTTSIDLSSLRPSSQYKDLGEYYAELNPLLYHISFQRIAEKEIMDAVETGKLYLFQIYNKDFAKGHHGKPNLHTLYWTGLFSPENLAKTSIKLNGQAELFYRPKSRMKRMAHRLGEKMLNKKLKDQKTPIPDTLYQELYDYVNHRLSHDLSDEARALLPNVITKEVSHEIIKDRRFTSDKFFFHVPITLNYQAANSPSKFNQRVNAYLKEHPETPIIGIDRGERNLIYITVIDSTGKILEQRSLNTIQQFDYQKKLDNREKERVAARQAWSVVGTIKDLKQGYLSQVIHEIVDLMIHYQAVVVLENLNFGFKSKRTGIAEKAVYQQFEKMLIDKLNCLVLKDYPAEKVGGVLNPYQLTDQFTSFAKMGTQSGFLFYVPAPYTSKIDPLTGFVDPFVWKTIKNHESRKHFLEGFDFLHYDVKTGDFILHFKMNRNLSFQRGLPGFMPAWDIVFEKNETQFDAKGTPFIAGKRIVPVIENHRFTGRYRDLYPANELIALLEEKGIVFRDGSNILPKLLENDDSHAIDTMVALIRSVLQMRNSNAATGEDYINSPVRDLNGVCFDSRFQNPEWPMDADANGAYHIALKGQLLLNHLKESKDLKLQNGISNQDWLAYIQELRN

SEQ ID NO: 1017 - protein, 1228 aa, Lachnospiraceae bacterium ND2006
MSKLEKFTNCYSLSKTLRFKAIPVGKTQENIDNKRLLVEDEKRAEDYKGVKKLLDRYYLSFINDVLHSIKLKNLNNYISLFRKKTRTEKENKELENLEINLRKEIAKAFKGNEGYKSLFKKDIIETILPEFLDDKDEIALVNSFNGFTTAFTGFFDNRENMFSEEAKSTSIAFRCINENLTRYISNMDIFEKVDAIFDKHEVQEIKEKILNSDYDVEDFFEGEFFNFVLTQEGIDVYNAIIGGFVTESGEKIKGLNEYINLYNQKTKQKLPKFKPLYKQVLSDRESLSFYGEGYTSDEEVLEVFRNTLNKNSEIFSSIKKLEKLFKNFDEYSSAGIFVKNGPAISTISKDIFGEWNVIRDKWNAEYDDIHLKKKAVVTEKYEDDRRKSFKKIGSFSLEQLQEYADADLSVVEKLKEIIIQKVDEIYKVYGSSEKLFDADFVLEKSLKKNDAVVAIMKDLLDSVKSFENYIKAFFGEGKETNRDESFYGDFVLAYDILLKVDHIYDAIRNYVTQKPYSKDKFKLYFQNPQFMGGWDKDKETDYRATILRYGSKYYLAIMDKKYAKCLQKIDKDDVNGNYEKINYKLLPGPNKMLPKVFFSKKWMAYYNPSEDIQKIYKNGTFKKGDMFNLNDCHKLIDFFKDSISRYPKWSNAYDFNFSETEKYKDIAGFYREVEEQGYKVSFESASKKEVDKLVEEGKLYMFQIYNKDFSDKSHGTPNLHTMYFKLLFDENNHGQIRLSGGAELFMRRASLKKEELVVHPANSPIANKNPDNPKKTTTLSYDVYKDKRFSEDQYELHIPIAINKCPKNIFKINTEVRVLLKHDDNPYVIGIDRGERNLLYIVVVDGKGNIVEQYSLNEIINNFNGIRIKTDYHSLLDKKEKERFEARQNWTSIENIKELKAGYISQVVHKICELVEKYDAVIALEDLNSGFKNSRVKVEKQVYQKFEKMLIDKLNYMVDKKSNPCATGGALKGYQITNKFESFKSMSTQNGFIFYIPAWLTSKIDPSTGFVNLLKTKYTSIADSKKFISSFDRIMYVPEEDLFEFALDYKNFSRTDADYIKKWKLYSYGNRIRIFRNPKKNNVFDWEEVCLTSAYKELFNKYGINYQQGDIRALLCEQSDKAFYSSFMALMSLMLQMRNSITGRTDVDFLISPVKNSDGIFYDSRNYEAQENAILPKNADANGAYNIARKVLWAIGQFKKAEDEKLDKVKIAISNKEWLEYAQTSVKH

SEQ ID NO: 1018 - protein, 1206 aa, Lachnospiraceae bacterium MA2020
MYYESLTKQYPVSKTIRNELIPIGKTLDNIRQNNILESDVKRKQNYEHVKGILDEYHKQLINEALDNCTLPSLKIAAEIYLKNQKEVSDREDFNKTQDLLRKEVVEKLKAHENFTKIGKKDILDLLEKLPSISEDDYNALESFRNFYTYFTSYNKVRENLYSDKEKSSTVAYRLINENFPKFLDNVKSYRFVKTAGILADGLGEEEQDSLFIVETFNKTLTQDGIDTYNSQVGKINSSINLYNQKNQKANGFRKIPKMKMLYKQILSDREESFIDEFQSDEVLIDNVESYGSVLIESLKSSKVSAFFDALRESKGKNVYVKNDLAKTAMSNIVFENWRTFDDLLNQEYDLANENKKKDDKYFEKRQKELKKNKSYSLEHLCNLSEDSCNLIENYIHQISDDIENIIINNETFLRIVINEHDRSRKLAKNRKAVKAIKDFLDSIKVLERELKLINSSGQELEKDLIVYSAHEELLVELKQVDSLYNMTRNYLTKKPFSTEKVKLNFNRSTLLNGWDRNKETDNLGVLLLKDGKYYLGIMNTSANKAFVNPPVAKTEKVFKKVDYKLLPVPNQMLPKVFFAKSNIDFYNPSSEIYSNYKKGTHKKGNMFSLEDCHNLIDFFKESISKHEDWSKFGFKFSDTASYNDISEFYREVEKQGYKLTYTDIDETYINDLIERNELYLFQIYNKDFSMYSKGKLNLHTLYFMMLFDQRNIDDVVYKLNGEAEVFYRPASISEDELIIHKAGEEIKNKNPNRARTKETSTFSYDIVKDKRYSKDKFTLHIPITMNFGVDEVKRFNDAVNSAIRIDENVNVIGIDRGERNLLYVVVIDSKGNILEQISLNSIINKEYDIETDYHALLDEREGGRDKARKDWNTVENIRDLKAGYLSQVVNVVAKLVLKYNAIICLEDLNFGFKRGRQKVEKQVYQKFEKMLIDKLNYLVIDKSREQTSPKELGGALNALQLTSKFKSFKELGKQSGVIYYVPAYLTSKIDPTTGFANLFYMKCENVEKSKRFFDGFDFIRFNALENVFEFGFDYRSFTQRACGINSKWTVCTNGERIIKYRNPDKNNMFDEKVVVVTDEMKNLFEQYKIPYEDGRNVKDMIISNEEAEFYRRLYRLLQQTLQMRNSTSDGTRDYIISPVKNKREAYFNSELSDGSVPKDADANGAYNIARKGLWVLEQIRQKSEGEKINLAMTNAEWLEYAQTHLL

SEQ ID NO: 1019 - DNA, 4059 bp, Acidaminococcus sp. strain BV3L6
atgacccagttcgagggcttcaccaacctgtaccaggtgagcaagaccctgcggttcgagctgatcccccagggcaagaccctgaagcacatccaggagcagggcttcatcgaggaggacaaggcccggaacgaccactacaaggagctgaagcccatcatcgaccggatctacaagacctacgccgaccagtgcctgcagctggtgcagctggactgggagaacctgagcgccgccatcgacagctaccggaaggagaagaccgaggagacccggaacgccctgatcgaggagcaggccacctaccggaacgccatccacgactacttcatcggccggaccgacaacctgaccgacgccatcaacaagcggcacgccgagatctacaagggcctgttcaaggccgagctgttcaacggcaaggtgctgaagcagctgggcaccgtgaccaccaccgagcacgagaacgccctgctgcggagcttcgacaagttcaccacctacttcagcggcttctacgagaaccggaagaacgtgttcagcgccgaggacatcagcaccgccatcccccaccggatcgtgcaggacaacttccccaagttcaaggagaactgccacatcttcacccggctgatcaccgccgtgcccagcctgcgggagcacttcgagaacgtgaagaaggccatcggcatcttcgtgagcaccagcatcgaggaggtgttcagcttccccttctacaaccagctgctgacccagacccagatcgacctgtacaaccagctgctgggcggcatcagccgggaggccggcaccgagaagatcaagggcctgaacgaggtgctgaacctggccatccagaagaacgacgagaccgcccacatcatcgccagcctgccccaccggttcatccccctgttcaagcagatcctgagcgaccggaacaccctgagcttcatcctggaggagttcaagagcgacgaggaggtgatccagagcttctgcaagtacaagaccctgctgcggaacgagaacgtgctggagaccgccgaggccctgttcaacgagctgaacagcatcgacctgacccacatcttcatcagccacaagaagctggagaccatcagcagcgccctgtgcgaccactgggacaccctgcggaacgccctgtacgagcggcggatcagcgagctgaccggcaagatcaccaagagcgccaaggagaaggtgcagcggagcctgaagcacgaggacatcaacctgcaggagatcatcagcgccgccggcaaggagctgagcgaggccttcaagcagaagaccagcgagatcctgagccacgcccacgccgccctggaccagcccctgcccaccaccctgaagaagcaggaggagaaggagatcctgaaaagccagctggacagcctgctgggcctgtaccacctgctggactggttcgccgtggacgagagcaacgaggtggaccccgagttcagcgcccggctgaccggcatcaagctggagatggagcccagcctgagcttctacaacaaggcccggaactacgccaccaagaagccctacagcgtggagaagttcaagctgaacttccagatgcccaccctggccagcggctgggacgtgaacaaggagaagaacaacggcgccatcctgttcgtgaagaacggcctgtactacctgggcatcatgcccaagcagaagggccggtacaaggccctgagcttcgagcccaccgagaagaccagcgagggcttcgacaagatgtactacgactacttccccgacgccgccaagatgatccccaagtgcagcacccagctgaaggccgtgaccgcccacttccagacccacaccacccccatcctgctgagcaacaacttcatcgagcccctggagatcaccaaggagatctacgacctgaacaaccccgagaaggagcccaagaagttccagaccgcctacgccaagaagaccggcgaccagaagggctaccgggaggccctgtgcaagtggatcgacttcacccgggacttcctgagcaagtacaccaagaccaccagcatcgacctgagcagcctgcggcccagcagccagtacaaggacctgggcgagtactacgccgagctgaaccccctgctgtaccacatcagcttccagcggatcgccgagaaggagatcatggacgccgtggagaccggcaagctgtacctgttccagatctacaacaaggacttcgccaagggccaccacggcaagcccaacctgcacaccctgtactggaccggcctgttcagccccgagaacctggccaagaccagcatcaagctgaacggccaggccgagctgttctaccggcccaagagccggatgaagcggatggcccaccggctgggcgagaagatgctgaacaagaagctgaaggaccagaagacccccatccccgacaccctgtaccaggagctgtacgactacgtgaaccaccggctgagccacgacctgagcgacgaggcccgggccctgctgcccaacgtgatcaccaaggaggtgagccacgagatcatcaaggaccggcggttcaccagcgacaagttcttcttccacgtgcccatcaccctgaactaccaggccgccaacagccccagcaagttcaaccagcgggtgaacgcctacctgaaggagcaccccgagacccccatcatcggcatcgaccggggcgagcggaacctgatctacatcaccgtgatcgacagcaccggcaagatcctggagcagcggagcctgaacaccatccagcagttcgactaccagaagaagctggacaaccgggagaaggagcgggtggccgcccggcaggcctggagcgtggtgggcaccatcaaggacctgaagcagggctacctgagccaggtgatccacgagatcgtggacctgatgatccactaccaggccgtggtggtgctggagaacctgaacttcggcttcaagagcaagcggaccggcatcgccgagaaggccgtgtaccagcagttcgagaagatgctgatcgacaagctgaactgcctggtgctgaaggactaccccgccgagaaggtgggcggcgtgctgaacccctaccagctgaccgaccagttcaccagcttcgccaagatgggcacccagagcggcttcctgttctacgtgcccgccccctacaccagcaagatcgaccccctgaccggcttcgtggaccccttcgtgtggaagaccatcaagaaccacgagagccggaagcacttcctggagggcttcgacttcctgcactacgacgtgaagaccggcgacttcatcctgcacttcaagatgaaccggaacctgagcttccagcggggcctgcccggcttcatgcccgcctgggacatcgtgttcgagaagaacgagacccagttcgacgccaagggcacccccttcatcgccggcaagcggatcgtgcccgtgatcgagaaccaccggttcaccggccggtaccgggacctgtaccccgccaacgagctgatcgccctgctggaggagaagggcatcgtgttccgggacggcagcaacatcctgcccaagctgctggagaacgacgacagccacgccatcgacaccatggtggccctgatccggagcgtgctgcagatgcggaacagcaacgccgccaccggcgaggactacatcaacagccccgtgcgggacctgaacggcgtgtgcttcgacagccggttccagaaccccgagtggcccatggacgccgacgccaacggcgcctaccacatcgccctgaagggccagctgctgctgaaccacctgaaggagagcaaggacctgaagctgcagaacggcatcagcaaccaggactggctggcctacatccaggagctgcggaacaagcggcccgccgccaccaagaaggccggccaggccaagaagaagaagggcagctacccctacgacgtgcccgactacgcctacccctacgacgtgcccgactacgcctacccctacgacgtgcccgactacgcctga

SEQ ID NO: 1020 - DNA, 3822 bp, Lachnospiraceae bacterium ND2006
atgagcaagctggagaagttcaccaactgctacagcctgagcaagaccctgcggttcaaggccatccccgtgggcaagacccaggagaacatcgacaacaagcggctgctggtggaggacgagaagcgggccgaggactacaagggcgtgaagaagctgctggaccggtactacctgagcttcatcaacgacgtgctgcacagcatcaagctgaagaacctgaacaactacatcagcctgttccggaagaagacccggaccgagaaggagaacaaggagctggagaacctggagatcaacctgcggaaggagatcgccaaggccttcaagggcaacgagggctacaagagcctgttcaagaaggacatcatcgagaccatcctgcccgagttcctggacgacaaggacgagatcgccctggtgaacagcttcaacggcttcaccaccgccttcaccggcttcttcgacaaccgggagaacatgttcagcgaggaggccaagagcaccagcatcgccttccggtgcatcaacgagaacctgacccggtacatcagcaacatggacatcttcgagaaggtggacgccatcttcgacaagcacgaggtgcaggagatcaaggagaagatcctgaacagcgactacgacgtggaggacttcttcgagggcgagttcttcaacttcgtgctgacccaggagggcatcgacgtgtacaacgccatcatcggcggcttcgtgaccgagagcggcgagaagatcaagggcctgaacgagtacatcaacctgtacaaccagaagaccaagcagaagctgcccaagttcaagcccctgtacaagcaggtgctgagcgaccgggagagcctgagcttctacggcgagggctacaccagcgacgaggaggtgctggaggtgttccggaacaccctgaacaagaacagcgagatcttcagcagcatcaagaagctggagaagctgttcaagaacttcgacgagtacagcagcgccggcatcttcgtgaagaacggccccgccatcagcaccatcagcaaggacatcttcggcgagtggaacgtgatccgggacaagtggaacgccgagtacgacgacatccacctgaagaagaaggccgtggtgaccgagaagtacgaggacgaccggcggaaaagcttcaagaagatcggcagcttcagcctggagcagctgcaggagtacgccgacgccgacctgagcgtggtggagaagctgaaggagatcatcatccagaaggtggacgagatctacaaggtgtacggcagcagcgagaagctgttcgacgccgacttcgtgctggagaaaagcctgaagaagaacgacgccgtggtggccatcatgaaggacctgctggacagcgtgaaaagcttcgagaactacatcaaggccttcttcggcgagggcaaggagaccaaccgggacgagagcttctacggcgacttcgtgctggcctacgacatcctgctgaaggtggaccacatctacgacgccatccggaactacgtgacccagaagccctacagcaaggacaagttcaagctgtacttccagaacccccagttcatgggcggctgggacaaggacaaggagaccgactaccgggccaccatcctgcggtacggcagcaagtactacctggccatcatggacaagaagtacgccaagtgcctgcagaagatcgacaaggacgacgtgaacggcaactacgagaagatcaactacaagctgctgcccggccccaacaagatgctgcccaaggtgttcttcagcaagaagtggatggcctactacaaccccagcgaggacatccagaagatctacaagaacggcaccttcaagaagggcgacatgttcaacctgaacgactgccacaagctgatcgacttcttcaaggacagcatcagccggtaccccaagtggagcaacgcctacgacttcaacttcagcgagaccgagaagtacaaggacatcgccggcttctaccgggaggtggaggagcagggctacaaggtgagcttcgagagcgccagcaagaaggaggtggacaagctggtggaggagggcaagctgtacatgttccagatctacaacaaggacttcagcgacaagagccacggcacccccaacctgcacaccatgtacttcaagctgctgttcgacgagaacaaccacggccagatccggctgagcggcggcgccgagctgttcatgcggcgggccagcctgaagaaggaggagctggtggtgcaccccgccaacagccccatcgccaacaagaaccccgacaaccccaagaagaccaccaccctgagctacgacgtgtacaaggacaagcggttcagcgaggaccagtacgagctgcacatccccatcgccatcaacaagtgccccaagaacatcttcaagatcaacaccgaggtgcgggtgctgctgaagcacgacgacaacccctacgtgatcggcatcgaccggggcgagcggaacctgctgtacatcgtggtggtggacggcaagggcaacatcgtggagcagtacagcctgaacgagatcatcaacaacttcaacggcatccggatcaagaccgactaccacagcctgctggacaagaaggagaaggagcggttcgaggcccggcagaactggaccagcatcgagaacatcaaggagctgaaggccggctacatcagccaggtggtgcacaagatctgcgagctggtggagaagtacgacgccgtgatcgccctggaggacctgaacagcggcttcaagaacagccgggtgaaggtggagaagcaggtgtaccagaagttcgagaagatgctgatcgacaagctgaactacatggtggacaagaaaagcaacccctgcgccaccggcggcgccctgaagggctaccagatcaccaacaagttcgagagcttcaagagcatgagcacccagaacggcttcatcttctacatccccgcctggctgaccagcaagatcgaccccagcaccggcttcgtgaacctgctgaagaccaagtacaccagcatcgccgacagcaagaagttcatcagcagcttcgaccggatcatgtacgtgcccgaggaggacctgttcgagttcgccctggactacaagaacttcagccggaccgacgccgactacatcaagaagtggaagctgtacagctacggcaaccggatccggatcttccggaaccccaagaagaacaacgtgttcgactgggaggaggtgtgcctgaccagcgcctacaaggagctgttcaacaagtacggcatcaactaccagcagggcgacatccgggccctgctgtgcgagcagagcgacaaggccttctacagcagcttcatggccctgatgagcctgatgctgcagatgcggaacagcatcaccggccggaccgacgtggacttcctgatcagccccgtgaagaacagcgacggcatcttctacgacagccggaactacgaggcccaggagaacgccatcctgcccaagaacgccgacgccaacggcgcctacaacatcgcccggaaggtgctgtgggccatcggccagttcaagaaggccgaggacgagaagctggacaaggtgaagatcgccatcagcaacaaggagtggctggagtacgcccagaccagcgtgaagcacaagcggcccgccgccaccaagaaggccggccaggccaagaagaagaagggcagctacccctacgacgtgcccgactacgcctacccctacgacgtgcccgactacgcctacccctacgacgtgcccgactacgcctga

SEQ ID NO: 1021 - DNA, 3756 bp, Lachnospiraceae bacterium MA2020
atgtactacgagagcctgaccaagcagtaccccgtgagcaagaccatccggaacgagctgatccccatcggcaagaccctggacaacatccggcagaacaacatcctggagagcgacgtgaagcggaagcagaactacgagcacgtgaagggcatcctggacgagtaccacaagcagctgatcaacgaggccctggacaactgcaccctgcccagcctgaagatcgccgccgagatctacctgaagaaccagaaggaggtgagcgaccgggaggacttcaacaagacccaggacctgctgcggaaggaggtggtggagaagctgaaggcccacgagaacttcaccaagatcggcaagaaggacatcctggacctgctggagaagctgcccagcatcagcgaggacgactacaacgccctggagagcttccggaacttctacacctacttcaccagctacaacaaggtgcgggagaacctgtacagcgacaaggagaaaagcagcaccgtggcctaccggctgatcaacgagaacttccccaagttcctggacaacgtgaaaagctaccggttcgtgaagaccgccggcatcctggccgacggcctgggcgaggaggagcaggacagcctgttcatcgtggagaccttcaacaagaccctgacccaggacggcatcgacacctacaacagccaggtgggcaagatcaacagcagcatcaacctgtacaaccagaagaaccagaaggccaacggcttccggaagatccccaagatgaagatgctgtacaagcagatcctgagcgaccgggaggagagcttcatcgacgagttccagagcgacgaggtgctgatcgacaacgtggagagctacggcagcgtgctgatcgagagcctgaaaagcagcaaggtgagcgccttcttcgacgccctgcgggagagcaagggcaagaacgtgtacgtgaagaacgacctggccaagaccgccatgagcaacatcgtgttcgagaactggcggaccttcgacgacctgctgaaccaggagtacgacctggccaacgagaacaagaagaaggacgacaagtacttcgagaagcggcagaaggagctgaagaagaacaagagctacagcctggagcacctgtgcaacctgagcgaggacagctgcaacctgatcgagaactacatccaccagatcagcgacgacatcgagaacatcatcatcaacaacgagaccttcctgcggatcgtgatcaacgagcacgaccggagccggaagctggccaagaaccggaaggccgtgaaggccatcaaggacttcctggacagcatcaaggtgctggagcgggagctgaagctgatcaacagcagcggccaggagctggagaaggacctgatcgtgtacagcgcccacgaggagctgctggtggagctgaagcaggtggacagcctgtacaacatgacccggaactacctgaccaagaagcccttcagcaccgagaaggtgaagctgaacttcaaccggagcaccctgctgaacggctgggaccggaacaaggagaccgacaacctgggcgtgctgctgctgaaggacggcaagtactacctgggcatcatgaacaccagcgccaacaaggccttcgtgaacccccccgtggccaagaccgagaaggtgttcaagaaggtggactacaagctgctgcccgtgcccaaccagatgctgcccaaggtgttcttcgccaagagcaacatcgacttctacaaccccagcagcgagatctacagcaactacaagaagggcacccacaagaagggcaacatgttcagcctggaggactgccacaacctgatcgacttcttcaaggagagcatcagcaagcacgaggactggagcaagttcggcttcaagttcagcgacaccgccagctacaacgacatcagcgagttctaccgggaggtggagaagcagggctacaagctgacctacaccgacatcgacgagacctacatcaacgacctgatcgagcggaacgagctgtacctgttccagatctacaacaaggacttcagcatgtacagcaagggcaagctgaacctgcacaccctgtacttcatgatgctgttcgaccagcggaacatcgacgacgtggtgtacaagctgaacggcgaggccgaggtgttctaccggcccgccagcatcagcgaggacgagctgatcatccacaaggccggcgaggagatcaagaacaagaaccccaaccgggcccggaccaaggagaccagcaccttcagctacgacatcgtgaaggacaagcggtacagcaaggacaagttcaccctgcacatccccatcaccatgaacttcggcgtggacgaggtgaagcggttcaacgacgccgtgaacagcgccatccggatcgacgagaacgtgaacgtgatcggcatcgaccggggcgagcggaacctgctgtacgtggtggtgatcgacagcaagggcaacatcctggagcagatcagcctgaacagcatcatcaacaaggagtacgacatcgagaccgactaccacgccctgctggacgagcgggagggcggccgggacaaggcccggaaggactggaacaccgtggagaacatccgggacctgaaggccggctacctgagccaggtggtgaacgtggtggccaagctggtgctgaagtacaacgccatcatctgcctggaggacctgaacttcggcttcaagcggggccggcagaaggtggagaagcaggtgtaccagaagttcgagaagatgctgatcgacaagctgaactacctggtgatcgacaagagccgggagcagaccagccccaaggagctgggcggcgccctgaacgccctgcagctgaccagcaagttcaagagcttcaaggagctgggcaagcagagcggcgtgatctactacgtgcccgcctacctgaccagcaagatcgaccccaccaccggcttcgccaacctgttctacatgaagtgcgagaacgtggagaaaagcaagcggttcttcgacggcttcgacttcatccggttcaacgccctggagaacgtgttcgagttcggcttcgactaccggagcttcacccagcgggcctgcggcatcaacagcaagtggaccgtgtgcaccaacggcgagcggatcatcaagtaccggaaccccgacaagaacaacatgttcgacgagaaggtggtggtggtgaccgacgagatgaagaacctgttcgagcagtacaagatcccctacgaggacggccggaacgtgaaggacatgatcatcagcaacgaggaggccgagttctaccggcggctgtaccggctgctgcagcagaccctgcagatgcggaacagcaccagcgacggcacccgggactacatcatcagccccgtgaagaacaagcgggaggcctacttcaacagcgagctgagcgacggcagcgtgcccaaggacgccgacgccaacggcgcctacaacatcgcccggaagggcctgtgggtgctggagcagatccggcagaaaagcgagggcgagaagatcaacctggccatgaccaacgccgagtggctggagtacgcccagacccacctgctgaagcggcccgccgccaccaagaaggccggccaggccaagaagaagaagggcagctacccctacgacgtgcccgactacgcctacccctacgacgtgcccgactacgcctacccctacgacgtgcccgactacgcctga

SEQ ID NO: 1022 - RNA, 40 nt, Artificial Sequence
  HBG1-1 full-length gRNA
uaauuucuacucuuguagauccuugucaaggcuauugguc

SEQ ID NO: 1023 - RNA, 41 nt, Artificial Sequence
  HBG1-1 modified full-length gRNA
  misc_feature (40)..(40): Modified to include 2'-O-methyl
  misc_feature (40)..(41): Linked by phosphorodithioate (PS2) bond
  misc_feature (41)..(41): Modified to include 2'-O-methyl
uaauuucuacucuuguagauccuugucaaggcuauugguca

SEQ ID NO: 1024 - RNA, 95 nt, Artificial Sequence
  tSpA dead gRNA
  misc_feature (1)..(1): Modified to contain 2'-O-methyl
  misc_feature (1)..(2): Linked by phosphorothioate (PS) bond
  misc_feature (2)..(3): Linked by phosphorothioate (PS) bond
  misc_feature (2)..(2): Modified to contain 2'-O-methyl
  misc_feature (3)..(4): Linked by phosphorothioate (PS) bond
  misc_feature (3)..(3): Modified to contain 2'-O-methyl
  misc_feature (92)..(93): Linked by phosphorothioate (PS) bond
  misc_feature (92)..(92): Modified to contain 2'-O-methyl
  misc_feature (93)..(94): Linked by phosphorothioate (PS) bond
  misc_feature (93)..(93): Modified to contain 2'-O-methyl
  misc_feature (94)..(95): Linked by phosphorothioate (PS) bond
  misc_feature (94)..(94): Modified to contain 2'-O-methyl
ggcuggccaacccauguuuuagagcuagaaauagcaaguuaaaauaaggcuaguccguuaucaacuugaaaaaguggcaccgagucggugcuuuu

SEQ ID NO: 1025 - RNA, 100 nt, Artificial Sequence
  SpA full-length gRNA
  misc_feature (1)..(1): Modified to contain 2'-O-methyl
  misc_feature (1)..(2): Linked by phosphorothioate (PS) bond
  misc_feature (2)..(2): Modified to contain 2'-O-methyl
  misc_feature (2)..(3): Linked by phosphorothioate (PS) bond
  misc_feature (3)..(3): Modified to contain 2'-O-methyl
  misc_feature (3)..(4): Linked by phosphorothioate (PS) bond
  misc_feature (97)..(97): Modified to contain 2'-O-methyl
  misc_feature (97)..(98): Linked by phosphorothioate (PS) bond
  misc_feature (98)..(98): Modified to contain 2'-O-methyl
  misc_feature (98)..(99): Linked by phosphorothioate (PS) bond
  misc_feature (99)..(100): Linked by phosphorothioate (PS) bond
  misc_feature (99)..(99): Modified to contain 2'-O-methyl
ggcaaggcuggccaacccauguuuuagagcuagaaauagcaaguuaaaauaaggcuaguccguuaucaacuugaaaaaguggcaccgagucggugcuuuu

SEQ ID NO: 1026 - RNA, 100 nt, Artificial Sequence
  SpG full-length gRNA
  misc_feature (1)..(1): Modified to contain 2'-O-methyl
  misc_feature (1)..(2): Linked by phosphorothioate (PS) bond
  misc_feature (2)..(2): Modified to contain 2'-O-methyl
  misc_feature (2)..(3): Linked by phosphorothioate (PS) bond
  misc_feature (3)..(3): Modified to contain 2'-O-methyl
  misc_feature (3)..(4): Linked by phosphorothioate (PS) bond
  misc_feature (97)..(97): Modified to contain 2'-O-methyl
  misc_feature (97)..(98): Linked by phosphorothioate (PS) bond
  misc_feature (98)..(98): Modified to contain 2'-O-methyl
  misc_feature (98)..(99): Linked by phosphorothioate (PS) bond
  misc_feature (99)..(100): Linked by phosphorothioate (PS) bond
  misc_feature (99)..(99): Modified to contain 2'-O-methyl
uagucuuagaguauccagugguuuuagagcuagaaauagcaaguuaaaauaaggcuaguccguuaucaacuugaaaaaguggcaccgagucggugcuuuu

SEQ ID NO: 1027 - RNA, 95 nt, Artificial Sequence
  Sp182 dead gRNA
  misc_feature (1)..(1): Modified to contain 2'-O-methyl
  misc_feature (1)..(2): Linked by phosphorothioate (PS) bond
  misc_feature (2)..(3): Linked by phosphorothioate (PS) bond
  misc_feature (2)..(2): Modified to contain 2'-O-methyl
  misc_feature (3)..(4): Linked by phosphorothioate (PS) bond
  misc_feature (3)..(3): Modified to contain 2'-O-methyl
  misc_feature (92)..(93): Linked by phosphorothioate (PS) bond
  misc_feature (92)..(92): Modified to contain 2'-O-methyl
  misc_feature (93)..(94): Linked by phosphorothioate (PS) bond
  misc_feature (93)..(93): Modified to contain 2'-O-methyl
  misc_feature (94)..(95): Linked by phosphorothioate (PS) bond
  misc_feature (94)..(94): Modified to contain 2'-O-methyl
uuagaguauccagugguuuuagagcuagaaauagcaaguuaaaauaaggcuaguccguuaucaacuugaaaaaguggcaccgagucggugcuuuu

SEQ ID NO: 1028 - RNA, 15 nt, Artificial Sequence
  Sp182 dead gRNA targeting domain
uuagaguauccagug

SEQ ID NO: 1029 - DNA, 15 bp, Artificial Sequence
  Sp182 dgRNA targeting domain
ttagagtatccagtg

SEQ ID NO: 1030 - DNA, 20 bp, Artificial Sequence
  SpG gRNA targeting domain
tagtcttagagtatccagtg

SEQ ID NO: 1031 - DNA, 15 bp, Artificial Sequence
  tSpA dead gRNA targeting domain
ggctggccaacccat

SEQ ID NO: 1032 - protein, 1334 aa, Artificial Sequence
  His-AsCpf1-sNLS-sNLS H800A
  MISC_FEATURE (3)..(8): His tag
  MISC_FEATURE (1319)..(1325): sNLS
  MISC_FEATURE (1328)..(1334): sNLS
MGHHHHHHGSTQFEGFTNLYQVSKTLRFELIPQGKTLKHIQEQGFIEEDKARNDHYKELKPIIDRIYKTYADQCLQLVQLDWENLSAAIDSYRKEKTEETRNALIEEQATYRNAIHDYFIGRTDNLTDAINKRHAEIYKGLFKAELFNGKVLKQLGTVTTTEHENALLRSFDKFTTYFSGFYENRKNVFSAEDISTAIPHRIVQDNFPKFKENCHIFTRLITAVPSLREHFENVKKAIGIFVSTSIEEVFSFPFYNQLLTQTQIDLYNQLLGGISREAGTEKIKGLNEVLNLAIQKNDETAHIIASLPHRFIPLFKQILSDRNTLSFILEEFKSDEEVIQSFCKYKTLLRNENVLETAEALFNELNSIDLTHIFISHKKLETISSALCDHWDTLRNALYERRISELTGKITKSAKEKVQRSLKHEDINLQEIISAAGKELSEAFKQKTSEILSHAHAALDQPLPTTLKKQEEKEILKSQLDSLLGLYHLLDWFAVDESNEVDPEFSARLTGIKLEMEPSLSFYNKARNYATKKPYSVEKFKLNFQMPTLASGWDVNKEKNNGAILFVKNGLYYLGIMPKQKGRYKALSFEPTEKTSEGFDKMYYDYFPDAAKMIPKCSTQLKAVTAHFQTHTTPILLSNNFIEPLEITKEIYDLNNPEKEPKKFQTAYAKKTGDQKGYREALCKWIDFTRDFLSKYTKTTSIDLSSLRPSSQYKDLGEYYAELNPLLYHISFQRIAEKEIMDAVETGKLYLFQIYNKDFAKGHHGKPNLHTLYWTGLFSPENLAKTSIKLNGQAELFYRPKSRMKRMAARLGEKMLNKKLKDQKTPIPDTLYQELYDYVNHRLSHDLSDEARALLPNVITKEVSHEIIKDRRFTSDKFFFHVPITLNYQAANSPSKFNQRVNAYLKEHPETPIIGIDRGERNLIYITVIDSTGKILEQRSLNTIQQFDYQKKLDNREKERVAARQAWSVVGTIKDLKQGYLSQVIHEIVDLMIHYQAVVVLENLNFGFKSKRTGIAEKAVYQQFEKMLIDKLNCLVLKDYPAEKVGGVLNPYQLTDQFTSFAKMGTQSGFLFYVPAPYTSKIDPLTGFVDPFVWKTIKNHESRKHFLEGFDFLHYDVKTGDFILHFKMNRNLSFQRGLPGFMPAWDIVFEKNETQFDAKGTPFIAGKRIVPVIENHRFTGRYRDLYPANELIALLEEKGIVFRDGSNILPKLLENDDSHAIDTMVALIRSVLQMRNSNAATGEDYINSPVRDLNGVCFDSRFQNPEWPMDADANGAYHIALKGQLLLNHLKESKDLKLQNGISNQDWLAYIQELRNGSPKKKRKVGSPKKKRKV

SEQ ID NO: 1033 - protein, 1384 aa, Artificial Sequence
  SpCas9WT
MKHHHHHHMPKKKRKVMDKKYSIGLDIGTNSVGWAVITDEYKVPSKKFKVLGNTDRHSIKKNLIGALLFDSGETAEATRLKRTARRRYTRRKNRICYLQEIFSNEMAKVDDSFFHRLEESFLVEEDKKHERHPIFGNIVDEVAYHEKYPTIYHLRKKLVDSTDKADLRLIYLALAHMIKFRGHFLIEGDLNPDNSDVDKLFIQLVQTYNQLFEENPINASGVDAKAILSARLSKSRRLENLIAQLPGEKKNGLFGNLIALSLGLTPNFKSNFDLAEDAKLQLSKDTYDDDLDNLLAQIGDQYADLFLAAKNLSDAILLSDILRVNTEITKAPLSASMIKRYDEHHQDLTLLKALVRQQLPEKYKEIFFDQSKNGYAGYIDGGASQEEFYKFIKPILEKMDGTEELLVKLNREDLLRKQRTFDNGSIPHQIHLGELHAILRRQEDFYPFLKDNREKIEKILTFRIPYYVGPLARGNSRFAWMTRKSEETITPWNFEEVVDKGASAQSFIERMTNFDKNLPNEKVLPKHSLLYEYFTVYNELTKVKYVTEGMRKPAFLSGEQKKAIVDLLFKTNRKVTVKQLKEDYFKKIECFDSVEISGVEDRFNASLGTYHDLLKIIKDKDFLDNEENEDILEDIVLTLTLFEDREMIEERLKTYAHLFDDKVMKQLKRRRYTGWGRLSRKLINGIRDKQSGKTILDFLKSDGFANRNFMQLIHDDSLTFKEDIQKAQVSGQGDSLHEHIANLAGSPAIKKGILQTVKVVDELVKVMGRHKPENIVIEMARENQTTQKGQKNSRERMKRIEEGIKELGSQILKEHPVENTQLQNEKLYLYYLQNGRDMYVDQELDINRLSDYDVDHIVPQSFLKDDSIDNKVLTRSDKNRGKSDNVPSEEVVKKMKNYWRQLLNAKLITQRKFDNLTKAERGGLSELDKAGFIKRQLVETRQITKHVAQILDSRMNTKYDENDKLIREVKVITLKSKLVSDFRKDFQFYKVREINNYHHAHDAYLNAVVGTALIKKYPKLESEFVYGDYKVYDVRKMIAKSEQEIGKATAKYFFYSNIMNFFKTEITLANGEIRKRPLIETNGETGEIVWDKGRDFATVRKVLSMPQVNIVKKTEVQTGGFSKESILPKRNSDKLIARKKDWDPKKYGGFDSPTVAYSVLVVAKVEKGKSKKLKSVKELLGITIMERSSFEKNPIDFLEAKGYKEVKKDLIIKLPKYSLFELENGRKRMLASAGELQKGNELALPSKYVNFLYLASHYEKLKGSPEDNEQKQLFVEQHKHYLDEIIEQISEFSKRVILADANLDKVLSAYNKHRDKPIREQAENIIHLFTLTNLGAPAAFKYFDTTIDRKRYTSTKEVLDATLIHQSITGLYETRIDLSQLGGD

SEQ ID NO: 1034 - protein, 1384 aa, Artificial Sequence
  His-NLS-SpCas9D10A
MKHHHHHHMPKKKRKVMDKKYSIGLAIGTNSVGWAVITDEYKVPSKKFKVLGNTDRHSIKKNLIGALLFDSGETAEATRLKRTARRRYTRRKNRICYLQEIFSNEMAKVDDSFFHRLEESFLVEEDKKHERHPIFGNIVDEVAYHEKYPTIYHLRKKLVDSTDKADLRLIYLALAHMIKFRGHFLIEGDLNPDNSDVDKLFIQLVQTYNQLFEENPINASGVDAKAILSARLSKSRRLENLIAQLPGEKKNGLFGNLIALSLGLTPNFKSNFDLAEDAKLQLSKDTYDDDLDNLLAQIGDQYADLFLAAKNLSDAILLSDILRVNTEITKAPLSASMIKRYDEHHQDLTLLKALVRQQLPEKYKEIFFDQSKNGYAGYIDGGASQEEFYKFIKPILEKMDGTEELLVKLNREDLLRKQRTFDNGSIPHQIHLGELHAILRRQEDFYPFLKDNREKIEKILTFRIPYYVGPLARGNSRFAWMTRKSEETITPWNFEEVVDKGASAQSFIERMTNFDKNLPNEKVLPKHSLLYEYFTVYNELTKVKYVTEGMRKPAFLSGEQKKAIVDLLFKTNRKVTVKQLKEDYFKKIECFDSVEISGVEDRFNASLGTYHDLLKIIKDKDFLDNEENEDILEDIVLTLTLFEDREMIEERLKTYAHLFDDKVMKQLKRRRYTGWGRLSRKLINGIRDKQSGKTILDFLKSDGFANRNFMQLIHDDSLTFKEDIQKAQVSGQGDSLHEHIANLAGSPAIKKGILQTVKVVDELVKVMGRHKPENIVIEMARENQTTQKGQKNSRERMKRIEEGIKELGSQILKEHPVENTQLQNEKLYLYYLQNGRDMYVDQELDINRLSDYDVDHIVPQSFLKDDSIDNKVLTRSDKNRGKSDNVPSEEVVKKMKNYWRQLLNAKLITQRKFDNLTKAERGGLSELDKAGFIKRQLVETRQITKHVAQILDSRMNTKYDENDKLIREVKVITLKSKLVSDFRKDFQFYKVREINNYHHAHDAYLNAVVGTALIKKYPKLESEFVYGDYKVYDVRKMIAKSEQEIGKATAKYFFYSNIMNFFKTEITLANGEIRKRPLIETNGETGEIVWDKGRDFATVRKVLSMPQVNIVKKTEVQTGGFSKESILPKRNSDKLIARKKDWDPKKYGGFDSPTVAYSVLVVAKVEKGKSKKLKSVKELLGITIMERSSFEKNPIDFLEAKGYKEVKKDLIIKLPKYSLFELENGRKRMLASAGELQKGNELALPSKYVNFLYLASHYEKLKGSPEDNEQKQLFVEQHKHYLDEIIEQISEFSKRVILADANLDKVLSAYNKHRDKPIREQAENIIHLFTLTNLGAPAAFKYFDTTIDRKRYTSTKEVLDATLIHQSITGLYETRIDLSQLGGD

SEQ ID NO: 1035 - protein, 1333 aa, Artificial Sequence; identical to SEQ ID NO: 1001
  AsCpf1 His-AsCpf1-NLS-NLS

SEQ ID NO: 1036 - protein, 1332 aa, Artificial Sequence
  AsCpf1 S542R/K607R  (AsCpf1 RR)
MKHHHHHHMPKKKRKVMTQFEGFTNLYQVSKTLRFELIPQGKTLKHIQEQGFIEEDKARNDHYKELKPIIDRIYKTYADQCLQLVQLDWENLSAAIDSYRKEKTEETRNALIEEQATYRNAIHDYFIGRTDNLTDAINKRHAEIYKGLFKAELFNGKVLKQLGTVTTTEHENALLRSFDKFTTYFSGFYENRKNVFSAEDISTAIPHRIVQDNFPKFKENCHIFTRLITAVPSLREHFENVKKAIGIFVSTSIEEVFSFPFYNQLLTQTQIDLYNQLLGGISREAGTEKIKGLNEVLNLAIQKNDETAHIIASLPHRFIPLFKQILSDRNTLSFILEEFKSDEEVIQSFCKYKTLLRNENVLETAEALFNELNSIDLTHIFISHKKLETISSALCDHWDTLRNALYERRISELTGKITKSAKEKVQRSLKHEDINLQEIISAAGKELSEAFKQKTSEILSHAHAALDQPLPTTLKKQEEKEILKSQLDSLLGLYHLLDWFAVDESNEVDPEFSARLTGIKLEMEPSLSFYNKARNYATKKPYSVEKFKLNFQMPTLARGWDVNKEKNNGAILFVKNGLYYLGIMPKQKGRYKALSFEPTEKTSEGFDKMYYDYFPDAAKMIPRCSTQLKAVTAHFQTHTTPILLSNNFIEPLEITKEIYDLNNPEKEPKKFQTAYAKKTGDQKGYREALCKWIDFTRDFLSKYTKTTSIDLSSLRPSSQYKDLGEYYAELNPLLYHISFQRIAEKEIMDAVETGKLYLFQIYNKDFAKGHHGKPNLHTLYWTGLFSPENLAKTSIKLNGQAELFYRPKSRMKRMAHRLGEKMLNKKLKDQKTPIPDTLYQELYDYVNHRLSHDLSDEARALLPNVITKEVSHEIIKDRRFTSDKFFFHVPITLNYQAANSPSKFNQRVNAYLKEHPETPIIGIDRGERNLIYITVIDSTGKILEQRSLNTIQQFDYQKKLDNREKERVAARQAWSVVGTIKDLKQGYLSQVIHEIVDLMIHYQAVVVLENLNFGFKSKRTGIAEKAVYQQFEKMLIDKLNCLVLKDYPAEKVGGVLNPYQLTDQFTSFAKMGTQSGFLFYVPAPYTSKIDPLTGFVDPFVWKTIKNHESRKHFLEGFDFLHYDVKTGDFILHFKMNRNLSFQRGLPGFMPAWDIVFEKNETQFDAKGTPFIAGKRIVPVIENHRFTGRYRDLYPANELIALLEEKGIVFRDGSNILPKLLENDDSHAIDTMVALIRSVLQMRNSNAATGEDYINSPVRDLNGVCFDSRFQNPEWPMDADANGAYHIALKGQLLLNHLKESKDLKLQNGISNQDWLAYIQELRNGPKKKRKVG

SEQ ID NO: 1037 - protein, 1332 aa, Artificial Sequence
  AsCpf1 S542R/K548V/N552R (AsCpf1 RVR)
MKHHHHHHMPKKKRKVMTQFEGFTNLYQVSKTLRFELIPQGKTLKHIQEQGFIEEDKARNDHYKELKPIIDRIYKTYADQCLQLVQLDWENLSAAIDSYRKEKTEETRNALIEEQATYRNAIHDYFIGRTDNLTDAINKRHAEIYKGLFKAELFNGKVLKQLGTVTTTEHENALLRSFDKFTTYFSGFYENRKNVFSAEDISTAIPHRIVQDNFPKFKENCHIFTRLITAVPSLREHFENVKKAIGIFVSTSIEEVFSFPFYNQLLTQTQIDLYNQLLGGISREAGTEKIKGLNEVLNLAIQKNDETAHIIASLPHRFIPLFKQILSDRNTLSFILEEFKSDEEVIQSFCKYKTLLRNENVLETAEALFNELNSIDLTHIFISHKKLETISSALCDHWDTLRNALYERRISELTGKITKSAKEKVQRSLKHEDINLQEIISAAGKELSEAFKQKTSEILSHAHAALDQPLPTTLKKQEEKEILKSQLDSLLGLYHLLDWFAVDESNEVDPEFSARLTGIKLEMEPSLSFYNKARNYATKKPYSVEKFKLNFQMPTLARGWDVNVEKNRGAILFVKNGLYYLGIMPKQKGRYKALSFEPTEKTSEGFDKMYYDYFPDAAKMIPKCSTQLKAVTAHFQTHTTPILLSNNFIEPLEITKEIYDLNNPEKEPKKFQTAYAKKTGDQKGYREALCKWIDFTRDFLSKYTKTTSIDLSSLRPSSQYKDLGEYYAELNPLLYHISFQRIAEKEIMDAVETGKLYLFQIYNKDFAKGHHGKPNLHTLYWTGLFSPENLAKTSIKLNGQAELFYRPKSRMKRMAHRLGEKMLNKKLKDQKTPIPDTLYQELYDYVNHRLSHDLSDEARALLPNVITKEVSHEIIKDRRFTSDKFFFHVPITLNYQAANSPSKFNQRVNAYLKEHPETPIIGIDRGERNLIYITVIDSTGKILEQRSLNTIQQFDYQKKLDNREKERVAARQAWSVVGTIKDLKQGYLSQVIHEIVDLMIHYQAVVVLENLNFGFKSKRTGIAEKAVYQQFEKMLIDKLNCLVLKDYPAEKVGGVLNPYQLTDQFTSFAKMGTQSGFLFYVPAPYTSKIDPLTGFVDPFVWKTIKNHESRKHFLEGFDFLHYDVKTGDFILHFKMNRNLSFQRGLPGFMPAWDIVFEKNETQFDAKGTPFIAGKRIVPVIENHRFTGRYRDLYPANELIALLEEKGIVFRDGSNILPKLLENDDSHAIDTMVALIRSVLQMRNSNAATGEDYINSPVRDLNGVCFDSRFQNPEWPMDADANGAYHIALKGQLLLNHLKESKDLKLQNGISNQDWLAYIQELRNGPKKKRKVG

SEQ ID NO: 1038 - protein, 1334 aa, Artificial Sequence
  His-AsCpf1-2xNLS-S542R/K607R/H800A (AsCpf1 RR-H800A)
MGHHHHHHGSTQFEGFTNLYQVSKTLRFELIPQGKTLKHIQEQGFIEEDKARNDHYKELKPIIDRIYKTYADQCLQLVQLDWENLSAAIDSYRKEKTEETRNALIEEQATYRNAIHDYFIGRTDNLTDAINKRHAEIYKGLFKAELFNGKVLKQLGTVTTTEHENALLRSFDKFTTYFSGFYENRKNVFSAEDISTAIPHRIVQDNFPKFKENCHIFTRLITAVPSLREHFENVKKAIGIFVSTSIEEVFSFPFYNQLLTQTQIDLYNQLLGGISREAGTEKIKGLNEVLNLAIQKNDETAHIIASLPHRFIPLFKQILSDRNTLSFILEEFKSDEEVIQSFCKYKTLLRNENVLETAEALFNELNSIDLTHIFISHKKLETISSALCDHWDTLRNALYERRISELTGKITKSAKEKVQRSLKHEDINLQEIISAAGKELSEAFKQKTSEILSHAHAALDQPLPTTLKKQEEKEILKSQLDSLLGLYHLLDWFAVDESNEVDPEFSARLTGIKLEMEPSLSFYNKARNYATKKPYSVEKFKLNFQMPTLARGWDVNKEKNNGAILFVKNGLYYLGIMPKQKGRYKALSFEPTEKTSEGFDKMYYDYFPDAAKMIPRCSTQLKAVTAHFQTHTTPILLSNNFIEPLEITKEIYDLNNPEKEPKKFQTAYAKKTGDQKGYREALCKWIDFTRDFLSKYTKTTSIDLSSLRPSSQYKDLGEYYAELNPLLYHISFQRIAEKEIMDAVETGKLYLFQIYNKDFAKGHHGKPNLHTLYWTGLFSPENLAKTSIKLNGQAELFYRPKSRMKRMAARLGEKMLNKKLKDQKTPIPDTLYQELYDYVNHRLSHDLSDEARALLPNVITKEVSHEIIKDRRFTSDKFFFHVPITLNYQAANSPSKFNQRVNAYLKEHPETPIIGIDRGERNLIYITVIDSTGKILEQRSLNTIQQFDYQKKLDNREKERVAARQAWSVVGTIKDLKQGYLSQVIHEIVDLMIHYQAVVVLENLNFGFKSKRTGIAEKAVYQQFEKMLIDKLNCLVLKDYPAEKVGGVLNPYQLTDQFTSFAKMGTQSGFLFYVPAPYTSKIDPLTGFVDPFVWKTIKNHESRKHFLEGFDFLHYDVKTGDFILHFKMNRNLSFQRGLPGFMPAWDIVFEKNETQFDAKGTPFIAGKRIVPVIENHRFTGRYRDLYPANELIALLEEKGIVFRDGSNILPKLLENDDSHAIDTMVALIRSVLQMRNSNAATGEDYINSPVRDLNGVCFDSRFQNPEWPMDADANGAYHIALKGQLLLNHLKESKDLKLQNGISNQDWLAYIQELRNGSPKKKRKVGSPKKKRKV

SEQ ID NO: 1039 - protein, 1334 aa, Artificial Sequence
  His-AsCpf1-2xNLS-S542R-K548V-N552R-H800A (Cpf1 RVR H800A)
MGHHHHHHGSTQFEGFTNLYQVSKTLRFELIPQGKTLKHIQEQGFIEEDKARNDHYKELKPIIDRIYKTYADQCLQLVQLDWENLSAAIDSYRKEKTEETRNALIEEQATYRNAIHDYFIGRTDNLTDAINKRHAEIYKGLFKAELFNGKVLKQLGTVTTTEHENALLRSFDKFTTYFSGFYENRKNVFSAEDISTAIPHRIVQDNFPKFKENCHIFTRLITAVPSLREHFENVKKAIGIFVSTSIEEVFSFPFYNQLLTQTQIDLYNQLLGGISREAGTEKIKGLNEVLNLAIQKNDETAHIIASLPHRFIPLFKQILSDRNTLSFILEEFKSDEEVIQSFCKYKTLLRNENVLETAEALFNELNSIDLTHIFISHKKLETISSALCDHWDTLRNALYERRISELTGKITKSAKEKVQRSLKHEDINLQEIISAAGKELSEAFKQKTSEILSHAHAALDQPLPTTLKKQEEKEILKSQLDSLLGLYHLLDWFAVDESNEVDPEFSARLTGIKLEMEPSLSFYNKARNYATKKPYSVEKFKLNFQMPTLARGWDVNVEKNRGAILFVKNGLYYLGIMPKQKGRYKALSFEPTEKTSEGFDKMYYDYFPDAAKMIPKCSTQLKAVTAHFQTHTTPILLSNNFIEPLEITKEIYDLNNPEKEPKKFQTAYAKKTGDQKGYREALCKWIDFTRDFLSKYTKTTSIDLSSLRPSSQYKDLGEYYAELNPLLYHISFQRIAEKEIMDAVETGKLYLFQIYNKDFAKGHHGKPNLHTLYWTGLFSPENLAKTSIKLNGQAELFYRPKSRMKRMAARLGEKMLNKKLKDQKTPIPDTLYQELYDYVNHRLSHDLSDEARALLPNVITKEVSHEIIKDRRFTSDKFFFHVPITLNYQAANSPSKFNQRVNAYLKEHPETPIIGIDRGERNLIYITVIDSTGKILEQRSLNTIQQFDYQKKLDNREKERVAARQAWSVVGTIKDLKQGYLSQVIHEIVDLMIHYQAVVVLENLNFGFKSKRTGIAEKAVYQQFEKMLIDKLNCLVLKDYPAEKVGGVLNPYQLTDQFTSFAKMGTQSGFLFYVPAPYTSKIDPLTGFVDPFVWKTIKNHESRKHFLEGFDFLHYDVKTGDFILHFKMNRNLSFQRGLPGFMPAWDIVFEKNETQFDAKGTPFIAGKRIVPVIENHRFTGRYRDLYPANELIALLEEKGIVFRDGSNILPKLLENDDSHAIDTMVALIRSVLQMRNSNAATGEDYINSPVRDLNGVCFDSRFQNPEWPMDADANGAYHIALKGQLLLNHLKESKDLKLQNGISNQDWLAYIQELRNGSPKKKRKVGSPKKKRKV

SEQ ID NO: 1040 - DNA, 100 bp, Artificial Sequence
  Ptx ssODN 18nt - positive strand (OLI16431)
  misc_feature (1)..(2): Linked by phosphorothioate (PS) bond
  misc_feature (99)..(100): Linked by phosphorothioate (PS) bond
ccctggcctcactggatactctaagactattggtcaagtttgccttgtcaaggctggccaacccatgggtggagtttagccagggaccgtttcagacaga

SEQ ID NO: 1041 - RNA, 40 nt, Artificial Sequence; identical to SEQ ID NO: 1022
  gRNA
  misc_feature (39)..(39): Modified to contain 2'-O-methyl
  misc_feature (39)..(40): Linked by phosphorodithioate (PS2) bond
  misc_feature (40)..(40): Modified to contain 2'-O-methyl

SEQ ID NO: 1042 - RNA, 45 nt, Artificial Sequence
  gRNA
cuuuuuaauuucuacucuuguagauccuugucaaggcuauugguc

SEQ ID NO: 1043 - RNA, 50 nt, Artificial Sequence
  gRNA
aagaccuuuuuaauuucuacucuuguagauccuugucaaggcuauugguc

SEQ ID NO: 1044 - RNA, 65 nt, Artificial Sequence
  gRNA
auguguuuuugucaaaagaccuuuuuaauuucuacucuuguagauccuugucaaggcuauugguc

SEQ ID NO: 1045 - RNA, 100 nt, Artificial Sequence
  gRNA
aggccagcuugccgguuuuuuagucgugcugcuucauguguuuuugucaaaagaccuuuuuaauuucuacucuuguagauccuugucaaggcuauugguc

SEQ ID NO: 1046 - DNA, 45 bp, Artificial Sequence
  gRNA
  misc_feature (1)..(5): DNA nucleotides
  misc_feature (6)..(45): RNA nucleotides
cttttuaauuucuacucuuguagauccuugucaaggcuauugguc

SEQ ID NO: 1047 - DNA, 50 bp, Artificial Sequence
  gRNA
  misc_feature (1)..(10): DNA nucleotides
  misc_feature (11)..(50): RNA nucleotides
aagaccttttuaauuucuacucuuguagauccuugucaaggcuauugguc

SEQ ID NO: 1048 - DNA, 65 bp, Artificial Sequence
  gRNA
  misc_feature (1)..(25): DNA nucleotides
  misc_feature (26)..(65): RNA nucleotides
atgtgtttttgtcaaaagaccttttuaauuucuacucuuguagauccuugucaaggcuauugguc

SEQ ID NO: 1049 - DNA, 100 bp, Artificial Sequence
  gRNA
  misc_feature (1)..(60): DNA nucleotides
  misc_feature (61)..(100): RNA nucleotides
aggccagcttgccggttttttagtcgtgctgcttcatgtgtttttgtcaaaagaccttttuaauuucuacucuuguagauccuugucaaggcuauugguc

SEQ ID NO: 1050 - DNA, 66 bp, Artificial Sequence
  gRNA
  misc_feature (1)..(25): DNA nucleotides
  misc_feature (26)..(66): RNA nucleotides
  misc_feature (65)..(65): Modified to contain 2'-O-methyl
  misc_feature (65)..(66): Linked by phosphorodithioate (PS2) bond
  misc_feature (66)..(66): Modified to contain 2'-O-methyl
atgtgtttttgtcaaaagaccttttuaauuucuacucuuguagauccuugucaaggcuauugguca

SEQ ID NO: 1051 - DNA, 66 bp, Artificial Sequence; identical to SEQ ID NO: 1050
  gRNA
  misc_feature (1)..(25): DNA nucleotides
  misc_feature (26)..(66): RNA nucleotides
  misc_feature (65)..(66): Linked by phosphorothioate (PS) bond
  misc_feature (66)..(66): Modified to contain 2'-O-methyl

SEQ ID NO: 1052 - DNA, 60 bp, Artificial Sequence
  gRNA
  misc_feature (1)..(20): DNA nucleotides
  misc_feature (21)..(60): RNA nucleotides
tttttgtcaaaagaccttttuaauuucuacucuuguagauccuugucaaggcuauugguc

SEQ ID NO: 1053 - DNA, 70 bp, Artificial Sequence
  gRNA
  misc_feature (1)..(30): DNA nucleotides
  misc_feature (31)..(70): RNA nucleotides
gcttcatgtgtttttgtcaaaagaccttttuaauuucuacucuuguagauccuugucaaggcuauugguc

SEQ ID NO: 1054 - DNA, 90 bp, Artificial Sequence
  gRNA
  misc_feature (1)..(50): DNA nucleotides
  misc_feature (51)..(90): RNA nucleotides
gccggttttttagtcgtgctgcttcatgtgtttttgtcaaaagaccttttuaauuucuacucuuguagauccuugucaaggcuauugguc

SEQ ID NO: 1055 - DNA, 80 bp, Artificial Sequence
  gRNA
  misc_feature (1)..(40): DNA nucleotides
  misc_feature (41)..(80): RNA nucleotides
tagtcgtgctgcttcatgtgtttttgtcaaaagaccttttuaauuucuacucuuguagauccuugucaaggcuauugguc

SEQ ID NO: 1056 - DNA, 60 bp, Artificial Sequence
  gRNA
  misc_feature (1)..(20): DNA nucleotides
  misc_feature (1)..(2): Linked by phosphorothioate (PS) bond
  misc_feature (2)..(3): Linked by phosphorothioate (PS) bond
  misc_feature (21)..(60): RNA nucleotides
ccgaagttttcttcggttttuaauuucuacucuuguagauccuugucaaggcuauugguc

SEQ ID NO: 1057 - DNA, 65 bp, Artificial Sequence
  gRNA
  misc_feature (1)..(25): DNA nucleotides
  misc_feature (1)..(2): Linked by phosphorothioate (PS) bond
  misc_feature (2)..(3): Linked by phosphorothioate (PS) bond
  misc_feature (26)..(65): RNA nucleotides
tttttccgaagttttcttcggttttuaauuucuacucuuguagauccuugucaaggcuauugguc

SEQ ID NO: 1058 - DNA, 70 bp, Artificial Sequence
  gRNA
  misc_feature (1)..(30): DNA nucleotides
  misc_feature (1)..(2): Linked by phosphorothioate (PS) bond
  misc_feature (2)..(3): Linked by phosphorothioate (PS) bond
  misc_feature (31)..(70): RNA nucleotides
aacgctttttccgaagttttcttcggttttuaauuucuacucuuguagauccuugucaaggcuauugguc

SEQ ID NO: 1059 - DNA, 81 bp, Artificial Sequence
  gRNA
  misc_feature (1)..(41): DNA nucleotides
  misc_feature (1)..(2): Linked by phosphorothioate (PS) bond
  misc_feature (2)..(3): Linked by phosphorothioate (PS) bond
  misc_feature (42)..(81): RNA nucleotides
gcgttgttttcaacgctttttccgaagttttcttcggttttuaauuucuacucuuguagauccuugucaaggcuauugguc

SEQ ID NO: 1060 - DNA, 102 bp, Artificial Sequence
  gRNA
  misc_feature (1)..(62): DNA nucleotides
  misc_feature (1)..(2): Linked by phosphorothioate (PS) bond
  misc_feature (2)..(3): Linked by phosphorothioate (PS) bond
  misc_feature (63)..(102): RNA nucleotides
ggcttcttttgaagcctttttgcgttgttttcaacgctttttccgaagttttcttcggttttuaauuucuacucuuguagauccuugucaaggcuauugguc

SEQ ID NO: 1061 - RNA, 40 nt, Artificial Sequence; identical to SEQ ID NO: 1022
  gRNA
  misc_feature (1)..(1): Modified to contain 2'-O-methyl

SEQ ID NO: 1062 - RNA, 40 nt, Artificial Sequence; identical to SEQ ID NO: 1022
  gRNA
  misc_feature (1)..(1): Modified to contain 2'-O-methyl
  misc_feature (1)..(2): Linked by phosphorothioate (PS) bond

SEQ ID NO: 1063 - RNA, 40 nt, Artificial Sequence; identical to SEQ ID NO: 1022
  gRNA
  misc_feature (1)..(1): Modified to contain 2'-O-methyl
  misc_feature (2)..(2): Modified to contain 2'-O-methyl

SEQ ID NO: 1064 - RNA, 40 nt, Artificial Sequence; identical to SEQ ID NO: 1022
  gRNA
  misc_feature (1)..(1): Modified to contain 2'-O-methyl
  misc_feature (1)..(2): Linked by phosphorothioate (PS) bond
  misc_feature (2)..(2): Modified to contain 2'-O-methyl

SEQ ID NO: 1065 - RNA, 40 nt, Artificial Sequence; identical to SEQ ID NO: 1022
  gRNA
  misc_feature (1)..(1): Modified to contain 2'-O-methyl
  misc_feature (2)..(2): Modified to contain 2'-O-methyl
  misc_feature (3)..(3): Modified to contain 2'-O-methyl

SEQ ID NO: 1066 - RNA, 40 nt, Artificial Sequence; identical to SEQ ID NO: 1022
  gRNA
  misc_feature (1)..(1): Modified to contain 2'-O-methyl
  misc_feature (1)..(2): Linked by phosphorothioate (PS) bond
  misc_feature (2)..(3): Linked by phosphorothioate (PS) bond
  misc_feature (2)..(2): Modified to contain 2'-O-methyl
  misc_feature (3)..(4): Linked by phosphorothioate (PS) bond
  misc_feature (3)..(3): Modified to contain 2'-O-methyl

SEQ ID NO: 1067 - DNA, 65 bp, Artificial Sequence; identical to SEQ ID NO: 1048
  gRNA
  misc_feature (1)..(25): DNA nucleotides
  misc_feature (1)..(2): Linked by phosphorothioate (PS) bond
  misc_feature (2)..(3): Linked by phosphorothioate (PS) bond
  misc_feature (26)..(65): RNA nucleotides

SEQ ID NO: 1068 - DNA, 66 bp, Artificial Sequence; identical to SEQ ID NO: 1050
  gRNA
  misc_feature (1)..(25): DNA nucleotides
  misc_feature (1)..(2): Linked by phosphorothioate (PS) bond
  misc_feature (2)..(3): Linked by phosphorothioate (PS) bond
  misc_feature (26)..(66): RNA nucleotides
  misc_feature (65)..(66): Linked by phosphorothioate (PS) bond
  misc_feature (66)..(66): Modified to contain 2'-O-methyl

SEQ ID NO: 1069 - RNA, 41 nt, Artificial Sequence; identical to SEQ ID NO: 1023
  gRNA
  misc_feature (40)..(41): Linked by phosphorothioate (PS) bond
  misc_feature (41)..(41): Modified to contain 2'-O-methyl

SEQ ID NO: 1070 - RNA, 42 nt, Artificial Sequence
  gRNA
  misc_feature (41)..(41): Modified to contain 2'-O-methyl
  misc_feature (41)..(42): Linked by phosphorothioate (PS) bond
uaauuucuacucuuguagauccuugucaaggcuauuggucau

SEQ ID NO: 1071 - RNA, 41 nt, Artificial Sequence
  gRNA
uaauuucuacucuuguagauccuugucaaggcuauuggucu

SEQ ID NO: 1072 - RNA, 42 nt, Artificial Sequence; identical to SEQ ID NO: 1070
  gRNA

SEQ ID NO: 1073 - RNA, 44 nt, Artificial Sequence
  gRNA
uaauuucuacucuuguagauccuugucaaggcuauuggucaagu

SEQ ID NO: 1074 - DNA, 66 bp, Artificial Sequence
  gRNA
  misc_feature (1)..(25): DNA nucleotides
  misc_feature (1)..(2): Linked by phosphorothioate (PS) bond
  misc_feature (2)..(3): Linked by phosphorothioate (PS) bond
  misc_feature (26)..(66): RNA nucleotides
atgtgtttttgtcaaaagaccttttuaauuucuacucuuguagauccuugucaaggcuauuggucu

SEQ ID NO: 1075 - DNA, 69 bp, Artificial Sequence
  gRNA
  misc_feature (1)..(25): DNA nucleotides
  misc_feature (1)..(2): Linked by phosphorothioate (PS) bond
  misc_feature (2)..(3): Linked by phosphorothioate (PS) bond
  misc_feature (26)..(69): RNA nucleotides
atgtgtttttgtcaaaagaccttttuaauuucuacucuuguagauccuugucaaggcuauuggucaagu

SEQ ID NO: 1076 - RNA, 41 nt, Artificial Sequence; identical to SEQ ID NO: 1023
  gRNA

SEQ ID NO: 1077 - RNA, 43 nt, Artificial Sequence
  gRNA
uaauuucuacucuuguagauccuugucaaggcuauuggucaag

SEQ ID NO: 1078 - DNA, 68 bp, Artificial Sequence
  gRNA
  misc_feature (1)..(25): DNA nucleotides
  misc_feature (1)..(2): Linked by phosphorothioate (PS) bond
  misc_feature (2)..(3): Linked by phosphorothioate (PS) bond
  misc_feature (26)..(68): RNA nucleotides
atgtgtttttgtcaaaagaccttttuaauuucuacucuuguagauccuugucaaggcuauuggucaag

SEQ ID NO: 1079 - RNA, 44 nt, Artificial Sequence
  gRNA
uaauuucuacucuuguagauccuugucaaggcuauuggucuuuu

SEQ ID NO: 1080 - RNA, 44 nt, Artificial Sequence; identical to SEQ ID NO: 1079
  gRNA
  misc_feature (41)..(41): Modified to contain 2'-O-methyl
  misc_feature (41)..(42): Linked by phosphorothioate (PS) bond
  misc_feature (42)..(43): Linked by phosphorothioate (PS) bond
  misc_feature (42)..(42): Modified to contain 2'-O-methyl
  misc_feature (43)..(43): Modified to contain 2'-O-methyl
  misc_feature (43)..(44): Linked by phosphorothioate (PS) bond

SEQ ID NO: 1081 - DNA, 69 bp, Artificial Sequence
  gRNA
  misc_feature (1)..(25): DNA nucleotides
  misc_feature (1)..(2): Linked by phosphorothioate (PS) bond
  misc_feature (2)..(3): Linked by phosphorothioate (PS) bond
  misc_feature (26)..(69): RNA nucleotides
atgtgtttttgtcaaaagaccttttuaauuucuacucuuguagauccuugucaaggcuauuggucuuuu

SEQ ID NO: 1082 - DNA, 66 bp, Artificial Sequence
  gRNA
  misc_feature (1)..(25): DNA nucleotides
  misc_feature (26)..(66): RNA nucleotides
  misc_feature (65)..(66): Linked by phosphorothioate (PS) bond
  misc_feature (66)..(66): Modified to contain 2'-O-methyl
aaaaaaaaaaaaaaaaaaaaaaaaauaauuucuacucuuguagauccuugucaaggcuauugguca

SEQ ID NO: 1083 - DNA, 66 bp, Artificial Sequence
  gRNA
  misc_feature (1)..(25): DNA nucleotides
  misc_feature (26)..(66): RNA nucleotides
  misc_feature (65)..(66): Linked by phosphorothioate (PS) bond
  misc_feature (66)..(66): Modified to contain 2'-O-methyl
tttttttttttttttttttttttttuaauuucuacucuuguagauccuugucaaggcuauugguca

SEQ ID NO: 1084 - DNA, 61 bp, Artificial Sequence
  gRNA
  misc_feature (1)..(20): DNA nucleotides
  misc_feature (1)..(2): Linked by phosphorothioate (PS) bond
  misc_feature (2)..(3): Linked by phosphorothioate (PS) bond
  misc_feature (21)..(61): RNA nucleotides
  misc_feature (60)..(61): Linked by phosphorothioate (PS) bond
  misc_feature (61)..(61): Modified to contain 2'-O-methyl
ccgaagttttcttcggttttuaauuucuacucuuguagauccuugucaaggcuauugguca

SEQ ID NO: 1085 - RNA, 41 nt, Artificial Sequence
  gRNA
  misc_feature (40)..(41): Linked by phosphorothioate (PS) bond
  misc_feature (41)..(41): Modified to contain 2'-O-methyl
uaauuucuacucuuguagauagacagauauuugcauugaga

SEQ ID NO: 1086 - DNA, 66 bp, Artificial Sequence
  gRNA
  misc_feature (1)..(25): DNA nucleotides
  misc_feature (26)..(66): RNA nucleotides
  misc_feature (65)..(66): Linked by phosphorothioate (PS) bond
  misc_feature (66)..(66): Modified to contain 2'-O-methyl
atgtgtttttgtcaaaagaccttttuaauuucuacucuuguagauagacagauauuugcauugaga

SEQ ID NO: 1087 - DNA, 61 bp, Artificial Sequence
  gRNA
  misc_feature (1)..(20): DNA nucleotides
  misc_feature (1)..(2): Linked by phosphorothioate (PS) bond
  misc_feature (2)..(3): Linked by phosphorothioate (PS) bond
  misc_feature (21)..(61): RNA nucleotides
  misc_feature (60)..(61): Linked by phosphorothioate (PS) bond
  misc_feature (61)..(61): Modified to contain 2'-O-methyl
ccgaagttttcttcggttttuaauuucuacucuuguagauagacagauauuugcauugaga

SEQ ID NO: 1088 - RNA, 41 nt, Artificial Sequence
  gRNA
  misc_feature (40)..(41): Linked by phosphorothioate (PS) bond
  misc_feature (41)..(41): Modified to contain 2'-O-methyl
uaauuucuacucuuguagaucauugagauaguguggggaag

SEQ ID NO: 1089 - DNA, 66 bp, Artificial Sequence
  gRNA
  misc_feature (1)..(25): DNA nucleotides
  misc_feature (26)..(66): RNA nucleotides
  misc_feature (65)..(66): Linked by phosphorothioate (PS) bond
  misc_feature (66)..(66): Modified to contain 2'-O-methyl
atgtgtttttgtcaaaagaccttttuaauuucuacucuuguagaucauugagauaguguggggaag

SEQ ID NO: 1090 - DNA, 61 bp, Artificial Sequence
  gRNA
  misc_feature (1)..(20): DNA nucleotides
  misc_feature (1)..(2): Linked by phosphorothioate (PS) bond
  misc_feature (2)..(3): Linked by phosphorothioate (PS) bond
  misc_feature (21)..(61): RNA nucleotides
  misc_feature (60)..(61): Linked by phosphorothioate (PS) bond
  misc_feature (61)..(61): Modified to contain 2'-O-methyl
ccgaagttttcttcggttttuaauuucuacucuuguagaucauugagauaguguggggaag

SEQ ID NO: 1091 - RNA, 41 nt, Artificial Sequence
  gRNA
  misc_feature (40)..(41): Linked by phosphorothioate (PS) bond
  misc_feature (41)..(41): Modified to contain 2'-O-methyl
uaauuucuacucuuguagaucuucucccaucauagaggaua

SEQ ID NO: 1092 - DNA, 66 bp, Artificial Sequence
  gRNA
  misc_feature (1)..(25): DNA nucleotides
  misc_feature (26)..(66): RNA nucleotides
  misc_feature (65)..(66): Linked by phosphorothioate (PS) bond
  misc_feature (66)..(66): Modified to contain 2'-O-methyl
atgtgtttttgtcaaaagaccttttuaauuucuacucuuguagaucuucucccaucauagaggaua

SEQ ID NO: 1093 - DNA, 61 bp, Artificial Sequence
  gRNA
  misc_feature (1)..(20): DNA nucleotides
  misc_feature (1)..(2): Linked by phosphorothioate (PS) bond
  misc_feature (2)..(3): Linked by phosphorothioate (PS) bond
  misc_feature (21)..(61): RNA nucleotides
  misc_feature (60)..(61): Linked by phosphorothioate (PS) bond
  misc_feature (61)..(61): Modified to contain 2'-O-methyl
ccgaagttttcttcggttttuaauuucuacucuuguagaucuucucccaucauagaggaua

SEQ ID NO: 1094 - protein, 1363 aa, Artificial Sequence
  Cpf1
  MISC_FEATURE (1310)..(1331): NLS
  MISC_FEATURE (1358)..(1363): His tag
MTQFEGFTNLYQVSKTLRFELIPQGKTLKHIQEQGFIEEDKARNDHYKELKPIIDRIYKTYADQCLQLVQLDWENLSAAIDSYRKEKTEETRNALIEEQATYRNAIHDYFIGRTDNLTDAINKRHAEIYKGLFKAELFNGKVLKQLGTVTTTEHENALLRSFDKFTTYFSGFYENRKNVFSAEDISTAIPHRIVQDNFPKFKENCHIFTRLITAVPSLREHFENVKKAIGIFVSTSIEEVFSFPFYNQLLTQTQIDLYNQLLGGISREAGTEKIKGLNEVLNLAIQKNDETAHIIASLPHRFIPLFKQILSDRNTLSFILEEFKSDEEVIQSFCKYKTLLRNENVLETAEALFNELNSIDLTHIFISHKKLETISSALCDHWDTLRNALYERRISELTGKITKSAKEKVQRSLKHEDINLQEIISAAGKELSEAFKQKTSEILSHAHAALDQPLPTTLKKQEEKEILKSQLDSLLGLYHLLDWFAVDESNEVDPEFSARLTGIKLEMEPSLSFYNKARNYATKKPYSVEKFKLNFQRPTLASGWDVNKEKNNGAILFVKNGLYYLGIMPKQKGRYKALSFEPTEKTSEGFDKMYYDYFPDAAKMIPKCSTQLKAVTAHFQTHTTPILLSNNFIEPLEITKEIYDLNNPEKEPKKFQTAYAKKTGDQKGYREALCKWIDFTRDFLSKYTKTTSIDLSSLRPSSQYKDLGEYYAELNPLLYHISFQRIAEKEIMDAVETGKLYLFQIYNKDFAKGHHGKPNLHTLYWTGLFSPENLAKTSIKLNGQAELFYRPKSRMKRMAHRLGEKMLNKKLKDQKTPIPDTLYQELYDYVNHRLSHDLSDEARALLPNVITKEVSHEIIKDRRFTSDKFLFHVPITLNYQAANSPSKFNQRVNAYLKEHPETPIIGIDRGERNLIYITVIDSTGKILEQRSLNTIQQFDYQKKLDNREKERVAARQAWSVVGTIKDLKQGYLSQVIHEIVDLMIHYQAVVVLENLNFGFKSKRTGIAEKAVYQQFEKMLIDKLNCLVLKDYPAEKVGGVLNPYQLTDQFTSFAKMGTQSGFLFYVPAPYTSKIDPLTGFVDPFVWKTIKNHESRKHFLEGFDFLHYDVKTGDFILHFKMNRNLSFQRGLPGFMPAWDIVFEKNETQFDAKGTPFIAGKRIVPVIENHRFTGRYRDLYPANELIALLEEKGIVFRDGSNILPKLLENDDSHAIDTMVALIRSVLQMRNSNAATGEDYINSPVRDLNGVCFDSRFQNPEWPMDADANGAYHIALKGQLLLNHLKESKDLKLQNGISNQDWLAYIQELRNGRSSDDEATADSQHAAPPKKKRKVGGSGGSGGSGGSGGSGGSGGSGGSLEHHHHHH

SEQ ID NO: 1095 - protein, 1363 aa, Artificial Sequence
  Cpf1
  MISC_FEATURE (1310)..(1331): NLS
  MISC_FEATURE (1358)..(1363): His tag
MTQFEGFTNLYQVSKTLRFELIPQGKTLKHIQEQGFIEEDKARNDHYKELKPIIDRIYKTYADQCLQLVQLDWENLSAAIDSYRKEKTEETRNALIEEQATYRNAIHDYFIGRTDNLTDAINKRHAEIYKGLFKAELFNGKVLKQLGTVTTTEHENALLRSFDKFTTYFSGFYENRKNVFSAEDISTAIPHRIVQDNFPKFKENCHIFTRLITAVPSLREHFENVKKAIGIFVSTSIEEVFSFPFYNQLLTQTQIDLYNQLLGGISREAGTEKIKGLNEVLNLAIQKNDETAHIIASLPHRFIPLFKQILSDRNTLSFILEEFKSDEEVIQSFCKYKTLLRNENVLETAEALFNELNSIDLTHIFISHKKLETISSALCDHWDTLRNALYERRISELTGKITKSAKEKVQRSLKHEDINLQEIISAAGKELSEAFKQKTSEILSHAHAALDQPLPTTLKKQEEKEILKSQLDSLLGLYHLLDWFAVDESNEVDPEFSARLTGIKLEMEPSLSFYNKARNYATKKPYSVEKFKLNFQMPTLASGWDVNKEKNNGAILFVKNGLYYLGIMPKQKGRYKALSFEPTEKTSEGFDKMYYDYFPDAAKMIPKCSTQLKAVTAHFQTHTTPILLSNNFIEPLEITKEIYDLNNPEKEPKKFQTAYAKKTGDQKGYREALCKWIDFTRDFLSKYTKTTSIDLSSLRPSSQYKDLGEYYAELNPLLYHISFQRIAEKEIMDAVETGKLYLFQIYNKDFAKGHHGKPNLHTLYWTGLFSPENLAKTSIKLNGQAELFYRPKSRMKRMAHRLGEKMLNKKLKDQKTPIPDTLYQELYDYVNHRLSHDLSDEARALLPNVITKEVSHEIIKDRRFTSDKFFFHVPITLNYQAANSPSKFNQRVNAYLKEHPETPIIGIDRGERNLIYITVIDSTGKILEQRSLNTIQQFDYQKKLDNREKERVAARQAWSVVGTIKDLKQGYLSQVIHEIVDLMIHYQAVVVLENLNFGFKSKRTGIAEKAVYQQFEKMLIDKLNCLVLKDYPAEKVGGVLNPYQLTDQFTSFAKMGTQSGFLFYVPAPYTSKIDPLTGFVDPFVWKTIKNHESRKHFLEGFDFLHYDVKTGDFILHFKMNRNLSFQRGLPGFMPAWDIVFEKNETQFDAKGTPFIAGKRIVPVIENHRFTGRYRDLYPANELIALLEEKGIVFRDGSNILPKLLENDDSHAIDTMVALIRSVLQMRNSNAATGEDYINSPVRDLNGVCFDSRFQNPEWPMDADANGAYHIALKGQLLLNHLKESKDLKLQNGISNQDWLAYIQELRNGRSSDDEATADSQHAAPPKKKRKVGGSGGSGGSGGSGGSGGSGGSGGSLEHHHHHH

SEQ ID NO: 1096 - protein, 1363 aa, Artificial Sequence
  Cpf1
  MISC_FEATURE (1310)..(1331): NLS
  MISC_FEATURE (1358)..(1363): His tag
MTQFEGFTNLYQVSKTLRFELIPQGKTLKHIQEQGFIEEDKARNDHYKELKPIIDRIYKTYADQCLQLVQLDWENLSAAIDSYRKEKTEETRNALIEEQATYRNAIHDYFIGRTDNLTDAINKRHAEIYKGLFKAELFNGKVLKQLGTVTTTEHENALLRSFDKFTTYFSGFYENRKNVFSAEDISTAIPHRIVQDNFPKFKENCHIFTRLITAVPSLREHFENVKKAIGIFVSTSIEEVFSFPFYNQLLTQTQIDLYNQLLGGISREAGTEKIKGLNEVLNLAIQKNDETAHIIASLPHRFIPLFKQILSDRNTLSFILEEFKSDEEVIQSFCKYKTLLRNENVLETAEALFNELNSIDLTHIFISHKKLETISSALCDHWDTLRNALYERRISELTGKITKSAKEKVQRSLKHEDINLQEIISAAGKELSEAFKQKTSEILSHAHAALDQPLPTTLKKQEEKEILKSQLDSLLGLYHLLDWFAVDESNEVDPEFSARLTGIKLEMEPSLSFYNKARNYATKKPYSVEKFKLNFQRPTLASGWDVNKEKNNGAILFVKNGLYYLGIMPKQKGRYKALSFEPTEKTSEGFDKMYYDYFPDAAKMIPKCSTQLKAVTAHFQTHTTPILLSNNFIEPLEITKEIYDLNNPEKEPKKFQTAYAKKTGDQKGYREALCKWIDFTRDFLSKYTKTTSIDLSSLRPSSQYKDLGEYYAELNPLLYHISFQRIAEKEIMDAVETGKLYLFQIYNKDFAKGHHGKPNLHTLYWTGLFSPENLAKTSIKLNGQAELFYRPKSRMKRMAARLGEKMLNKKLKDQKTPIPDTLYQELYDYVNHRLSHDLSDEARALLPNVITKEVSHEIIKDRRFTSDKFLFHVPITLNYQAANSPSKFNQRVNAYLKEHPETPIIGIDRGERNLIYITVIDSTGKILEQRSLNTIQQFDYQKKLDNREKERVAARQAWSVVGTIKDLKQGYLSQVIHEIVDLMIHYQAVVVLENLNFGFKSKRTGIAEKAVYQQFEKMLIDKLNCLVLKDYPAEKVGGVLNPYQLTDQFTSFAKMGTQSGFLFYVPAPYTSKIDPLTGFVDPFVWKTIKNHESRKHFLEGFDFLHYDVKTGDFILHFKMNRNLSFQRGLPGFMPAWDIVFEKNETQFDAKGTPFIAGKRIVPVIENHRFTGRYRDLYPANELIALLEEKGIVFRDGSNILPKLLENDDSHAIDTMVALIRSVLQMRNSNAATGEDYINSPVRDLNGVCFDSRFQNPEWPMDADANGAYHIALKGQLLLNHLKESKDLKLQNGISNQDWLAYIQELRNGRSSDDEATADSQHAAPPKKKRKVGGSGGSGGSGGSGGSGGSGGSGGSLEHHHHHH

SEQ ID NO: 1097 - protein, 1331 aa, Artificial Sequence
  Cpf1
  MISC_FEATURE (1310)..(1331): NLS
MTQFEGFTNLYQVSKTLRFELIPQGKTLKHIQEQGFIEEDKARNDHYKELKPIIDRIYKTYADQCLQLVQLDWENLSAAIDSYRKEKTEETRNALIEEQATYRNAIHDYFIGRTDNLTDAINKRHAEIYKGLFKAELFNGKVLKQLGTVTTTEHENALLRSFDKFTTYFSGFYENRKNVFSAEDISTAIPHRIVQDNFPKFKENCHIFTRLITAVPSLREHFENVKKAIGIFVSTSIEEVFSFPFYNQLLTQTQIDLYNQLLGGISREAGTEKIKGLNEVLNLAIQKNDETAHIIASLPHRFIPLFKQILSDRNTLSFILEEFKSDEEVIQSFCKYKTLLRNENVLETAEALFNELNSIDLTHIFISHKKLETISSALCDHWDTLRNALYERRISELTGKITKSAKEKVQRSLKHEDINLQEIISAAGKELSEAFKQKTSEILSHAHAALDQPLPTTLKKQEEKEILKSQLDSLLGLYHLLDWFAVDESNEVDPEFSARLTGIKLEMEPSLSFYNKARNYATKKPYSVEKFKLNFQRPTLASGWDVNKEKNNGAILFVKNGLYYLGIMPKQKGRYKALSFEPTEKTSEGFDKMYYDYFPDAAKMIPKCSTQLKAVTAHFQTHTTPILLSNNFIEPLEITKEIYDLNNPEKEPKKFQTAYAKKTGDQKGYREALCKWIDFTRDFLSKYTKTTSIDLSSLRPSSQYKDLGEYYAELNPLLYHISFQRIAEKEIMDAVETGKLYLFQIYNKDFAKGHHGKPNLHTLYWTGLFSPENLAKTSIKLNGQAELFYRPKSRMKRMAARLGEKMLNKKLKDQKTPIPDTLYQELYDYVNHRLSHDLSDEARALLPNVITKEVSHEIIKDRRFTSDKFLFHVPITLNYQAANSPSKFNQRVNAYLKEHPETPIIGIDRGERNLIYITVIDSTGKILEQRSLNTIQQFDYQKKLDNREKERVAARQAWSVVGTIKDLKQGYLSQVIHEIVDLMIHYQAVVVLENLNFGFKSKRTGIAEKAVYQQFEKMLIDKLNCLVLKDYPAEKVGGVLNPYQLTDQFTSFAKMGTQSGFLFYVPAPYTSKIDPLTGFVDPFVWKTIKNHESRKHFLEGFDFLHYDVKTGDFILHFKMNRNLSFQRGLPGFMPAWDIVFEKNETQFDAKGTPFIAGKRIVPVIENHRFTGRYRDLYPANELIALLEEKGIVFRDGSNILPKLLENDDSHAIDTMVALIRSVLQMRNSNAATGEDYINSPVRDLNGVCFDSRFQNPEWPMDADANGAYHIALKGQLLLNHLKESKDLKLQNGISNQDWLAYIQELRNGRSSDDEATADSQHAAPPKKKRKV

SEQ ID NO: 1098 - DNA, 67 bp, Artificial Sequence
  gRNA
  misc_feature (1)..(25): DNA nucleotides
  misc_feature (1)..(2): Linked by phosphorothioate (PS) bond
  misc_feature (2)..(3): Linked by phosphorothioate (PS) bond
  misc_feature (26)..(67): RNA nucleotides
  misc_feature (66)..(67): Linked by phosphorothioate (PS) bond
  misc_feature (66)..(66): Modified to contain 2'-O-methyl
atgtgtttttgtcaaaagaccttttuaauuucuacucuuguagauccuugucaaggcuauuggucau

SEQ ID NO: 1099 - DNA, 68 bp, Artificial Sequence
  gRNA
  misc_feature (1)..(25): DNA nucleotides
  misc_feature (1)..(2): Linked by phosphorothioate (PS) bond
  misc_feature (2)..(3): Linked by phosphorothioate (PS) bond
  misc_feature (26)..(68): RNA nucleotides
  misc_feature (66)..(67): Linked by phosphorothioate (PS) bond
  misc_feature (66)..(66): Modified to contain 2'-O-methyl
  misc_feature (67)..(67): Modified to contain 2'-O-methyl
  misc_feature (67)..(68): Linked by phosphorothioate (PS) bond
atgtgtttttgtcaaaagaccttttuaauuucuacucuuguagauccuugucaaggcuauuggucaau

SEQ ID NO: 1100 - DNA, 66 bp, Artificial Sequence; identical to SEQ ID NO: 1074
  gRNA
  misc_feature (1)..(25): DNA nucleotides
  misc_feature (1)..(2): Linked by phosphorothioate (PS) bond
  misc_feature (2)..(3): Linked by phosphorothioate (PS) bond
  misc_feature (26)..(66): RNA nucleotides
  misc_feature (65)..(65): Modified to contain 2'-O-methyl
  misc_feature (65)..(66): Linked by phosphorothioate (PS) bond

SEQ ID NO: 1101 - DNA, 65 bp, Artificial Sequence; identical to SEQ ID NO: 1048
  gRNA
  misc_feature (1)..(25): DNA nucleotides
  misc_feature (1)..(2): Linked by phosphorothioate (PS) bond
  misc_feature (2)..(3): Linked by phosphorothioate (PS) bond
  misc_feature (26)..(65): RNA nucleotides
  misc_feature (64)..(65): Linked by phosphorothioate (PS) bond
  misc_feature (65)..(65): Modified to contain 2'-O-methyl

SEQ ID NO: 1102 - DNA, 67 bp, Artificial Sequence
  gRNA
  misc_feature (1)..(25): DNA nucleotides
  misc_feature (1)..(2): Linked by phosphorothioate (PS) bond
  misc_feature (2)..(3): Linked by phosphorothioate (PS) bond
  misc_feature (26)..(67): RNA nucleotides
  misc_feature (65)..(66): Linked by phosphorothioate (PS) bond
  misc_feature (66)..(67): Linked by phosphorothioate (PS) bond
  misc_feature (66)..(66): Modified to contain 2'-O-methyl
  misc_feature (67)..(67): Modified to contain 2'-O-methyl
atgtgtttttgtcaaaagaccttttuaauuucuacucuuguagauccuugucaaggcuauuggucaa

SEQ ID NO: 1103 - RNA, 66 nt, Artificial Sequence
  gRNA
  misc_feature (1)..(2): Linked by phosphorothioate (PS) bond
  misc_feature (1)..(1): Modified to contain 2'-O-methyl
  misc_feature (2)..(2): Modified to contain 2'-O-methyl
  misc_feature (2)..(3): Linked by phosphorothioate (PS) bond
  misc_feature (65)..(66): Linked by phosphorothioate (PS) bond
  misc_feature (66)..(66): Modified to contain 2'-O-methyl
auguguuuuugucaaaagaccuuuuuaauuucuacucuuguagauccuugucaaggcuauugguca

SEQ ID NO: 1104 - RNA, 66 nt, Artificial Sequence
  gRNA
  misc_feature (1)..(2): Linked by phosphorothioate (PS) bond
  misc_feature (1)..(1): Modified to contain 2'-O-methyl
  misc_feature (2)..(2): Modified to contain 2'-O-methyl
  misc_feature (2)..(3): Linked by phosphorothioate (PS) bond
  misc_feature (65)..(66): Linked by phosphorothioate (PS) bond
  misc_feature (66)..(66): Modified to contain 2'-O-methyl
aaaaaaaaaaaaaaaaaaaaaaaaauaauuucuacucuuguagauccuugucaaggcuauugguca

SEQ ID NO: 1105 - RNA, 66 nt, Artificial Sequence
  gRNA
  misc_feature (1)..(2): Linked by phosphorothioate (PS) bond
  misc_feature (1)..(1): Modified to contain 2'-O-methyl
  misc_feature (2)..(2): Modified to contain 2'-O-methyl
  misc_feature (2)..(3): Linked by phosphorothioate (PS) bond
  misc_feature (65)..(66): Linked by phosphorothioate (PS) bond
  misc_feature (66)..(66): Modified to contain 2'-O-methyl
uuuuuuuuuuuuuuuuuuuuuuuuuuaauuucuacucuuguagauccuugucaaggcuauugguca

SEQ ID NO: 1106 - DNA, 42 bp, Artificial Sequence
  gRNA
  misc_feature (1)..(2): Linked by phosphorothioate (PS) bond
  misc_feature (2)..(3): Linked by phosphorothioate (PS) bond
uaauuucuacucuuguagauccuugucaggcuauuggtcaag

SEQ ID NO: 1107 - protein, 1331 aa, Artificial Sequence
  Cpf1
  MISC_FEATURE (1310)..(1331): NLS
STQFEGFTNLYQVSKTLRFELIPQGKTLKHIQEQGFIEEDKARNDHYKELKPIIDRIYKTYADQCLQLVQLDWENLSAAIDSYRKEKTEETRNALIEEQATYRNAIHDYFIGRTDNLTDAINKRHAEIYKGLFKAELFNGKVLKQLGTVTTTEHENALLRSFDKFTTYFSGFYENRKNVFSAEDISTAIPHRIVQDNFPKFKENCHIFTRLITAVPSLREHFENVKKAIGIFVSTSIEEVFSFPFYNQLLTQTQIDLYNQLLGGISREAGTEKIKGLNEVLNLAIQKNDETAHIIASLPHRFIPLFKQILSDRNTLSFILEEFKSDEEVIQSFCKYKTLLRNENVLETAEALFNELNSIDLTHIFISHKKLETISSALCDHWDTLRNALYERRISELTGKITKSAKEKVQRSLKHEDINLQEIISAAGKELSEAFKQKTSEILSHAHAALDQPLPTTLKKQEEKEILKSQLDSLLGLYHLLDWFAVDESNEVDPEFSARLTGIKLEMEPSLSFYNKARNYATKKPYSVEKFKLNFQRPTLASGWDVNKEKNNGAILFVKNGLYYLGIMPKQKGRYKALSFEPTEKTSEGFDKMYYDYFPDAAKMIPKCSTQLKAVTAHFQTHTTPILLSNNFIEPLEITKEIYDLNNPEKEPKKFQTAYAKKTGDQKGYREALCKWIDFTRDFLSKYTKTTSIDLSSLRPSSQYKDLGEYYAELNPLLYHISFQRIAEKEIMDAVETGKLYLFQIYNKDFAKGHHGKPNLHTLYWTGLFSPENLAKTSIKLNGQAELFYRPKSRMKRMAHRLGEKMLNKKLKDQKTPIPDTLYQELYDYVNHRLSHDLSDEARALLPNVITKEVSHEIIKDRRFTSDKFLFHVPITLNYQAANSPSKFNQRVNAYLKEHPETPIIGIDRGERNLIYITVIDSTGKILEQRSLNTIQQFDYQKKLDNREKERVAARQAWSVVGTIKDLKQGYLSQVIHEIVDLMIHYQAVVVLENLNFGFKSKRTGIAEKAVYQQFEKMLIDKLNCLVLKDYPAEKVGGVLNPYQLTDQFTSFAKMGTQSGFLFYVPAPYTSKIDPLTGFVDPFVWKTIKNHESRKHFLEGFDFLHYDVKTGDFILHFKMNRNLSFQRGLPGFMPAWDIVFEKNETQFDAKGTPFIAGKRIVPVIENHRFTGRYRDLYPANELIALLEEKGIVFRDGSNILPKLLENDDSHAIDTMVALIRSVLQMRNSNAATGEDYINSPVRDLNGVCFDSRFQNPEWPMDADANGAYHIALKGQLLLNHLKESKDLKLQNGISNQDWLAYIQELRNGRSSDDEATADSQHAAPPKKKRKV

SEQ ID NO: 1108 - protein, 1363 aa, Artificial Sequence
  Cpf1
  MISC_FEATURE (1310)..(1331): NLS
  MISC_FEATURE (1358)..(1363): His tag
STQFEGFTNLYQVSKTLRFELIPQGKTLKHIQEQGFIEEDKARNDHYKELKPIIDRIYKTYADQCLQLVQLDWENLSAAIDSYRKEKTEETRNALIEEQATYRNAIHDYFIGRTDNLTDAINKRHAEIYKGLFKAELFNGKVLKQLGTVTTTEHENALLRSFDKFTTYFSGFYENRKNVFSAEDISTAIPHRIVQDNFPKFKENCHIFTRLITAVPSLREHFENVKKAIGIFVSTSIEEVFSFPFYNQLLTQTQIDLYNQLLGGISREAGTEKIKGLNEVLNLAIQKNDETAHIIASLPHRFIPLFKQILSDRNTLSFILEEFKSDEEVIQSFCKYKTLLRNENVLETAEALFNELNSIDLTHIFISHKKLETISSALCDHWDTLRNALYERRISELTGKITKSAKEKVQRSLKHEDINLQEIISAAGKELSEAFKQKTSEILSHAHAALDQPLPTTLKKQEEKEILKSQLDSLLGLYHLLDWFAVDESNEVDPEFSARLTGIKLEMEPSLSFYNKARNYATKKPYSVEKFKLNFQRPTLASGWDVNKEKNNGAILFVKNGLYYLGIMPKQKGRYKALSFEPTEKTSEGFDKMYYDYFPDAAKMIPKCSTQLKAVTAHFQTHTTPILLSNNFIEPLEITKEIYDLNNPEKEPKKFQTAYAKKTGDQKGYREALCKWIDFTRDFLSKYTKTTSIDLSSLRPSSQYKDLGEYYAELNPLLYHISFQRIAEKEIMDAVETGKLYLFQIYNKDFAKGHHGKPNLHTLYWTGLFSPENLAKTSIKLNGQAELFYRPKSRMKRMAHRLGEKMLNKKLKDQKTPIPDTLYQELYDYVNHRLSHDLSDEARALLPNVITKEVSHEIIKDRRFTSDKFLFHVPITLNYQAANSPSKFNQRVNAYLKEHPETPIIGIDRGERNLIYITVIDSTGKILEQRSLNTIQQFDYQKKLDNREKERVAARQAWSVVGTIKDLKQGYLSQVIHEIVDLMIHYQAVVVLENLNFGFKSKRTGIAEKAVYQQFEKMLIDKLNCLVLKDYPAEKVGGVLNPYQLTDQFTSFAKMGTQSGFLFYVPAPYTSKIDPLTGFVDPFVWKTIKNHESRKHFLEGFDFLHYDVKTGDFILHFKMNRNLSFQRGLPGFMPAWDIVFEKNETQFDAKGTPFIAGKRIVPVIENHRFTGRYRDLYPANELIALLEEKGIVFRDGSNILPKLLENDDSHAIDTMVALIRSVLQMRNSNAATGEDYINSPVRDLNGVCFDSRFQNPEWPMDADANGAYHIALKGQLLLNHLKESKDLKLQNGISNQDWLAYIQELRNGRSSDDEATADSQHAAPPKKKRKVGGSGGSGGSGGSGGSGGSGGSGGSLEHHHHHH

SEQ ID NO: 1109 - protein, 1361 aa, Artificial Sequence
  Cpf1
  MISC_FEATURE (1342)..(1348): NLS
  MISC_FEATURE (1356)..(1361): His tag
MGRDPGKPIPNPLLGLDSTAPKKKRKVGIHGVPAATQFEGFTNLYQVSKTLRFELIPQGKTLKHIQEQGFIEEDKARNDHYKELKPIIDRIYKTYADQCLQLVQLDWENLSAAIDSYRKEKTEETRNALIEEQATYRNAIHDYFIGRTDNLTDAINKRHAEIYKGLFKAELFNGKVLKQLGTVTTTEHENALLRSFDKFTTYFSGFYENRKNVFSAEDISTAIPHRIVQDNFPKFKENCHIFTRLITAVPSLREHFENVKKAIGIFVSTSIEEVFSFPFYNQLLTQTQIDLYNQLLGGISREAGTEKIKGLNEVLNLAIQKNDETAHIIASLPHRFIPLFKQILSDRNTLSFILEEFKSDEEVIQSFCKYKTLLRNENVLETAEALFNELNSIDLTHIFISHKKLETISSALCDHWDTLRNALYERRISELTGKITKSAKEKVQRSLKHEDINLQEIISAAGKELSEAFKQKTSEILSHAHAALDQPLPTTLKKQEEKEILKSQLDSLLGLYHLLDWFAVDESNEVDPEFSARLTGIKLEMEPSLSFYNKARNYATKKPYSVEKFKLNFQMPTLASGWDVNKEKNNGAILFVKNGLYYLGIMPKQKGRYKALSFEPTEKTSEGFDKMYYDYFPDAAKMIPKCSTQLKAVTAHFQTHTTPILLSNNFIEPLEITKEIYDLNNPEKEPKKFQTAYAKKTGDQKGYREALCKWIDFTRDFLSKYTKTTSIDLSSLRPSSQYKDLGEYYAELNPLLYHISFQRIAEKEIMDAVETGKLYLFQIYNKDFAKGHHGKPNLHTLYWTGLFSPENLAKTSIKLNGQAELFYRPKSRMKRMAHRLGEKMLNKKLKDQKTPIPDTLYQELYDYVNHRLSHDLSDEARALLPNVITKEVSHEIIKDRRFTSDKFFFHVPITLNYQAANSPSKFNQRVNAYLKEHPETPIIGIDRGERNLIYITVIDSTGKILEQRSLNTIQQFDYQKKLDNREKERVAARQAWSVVGTIKDLKQGYLSQVIHEIVDLMIHYQAVVVLENLNFGFKSKRTGIAEKAVYQQFEKMLIDKLNCLVLKDYPAEKVGGVLNPYQLTDQFTSFAKMGTQSGFLFYVPAPYTSKIDPLTGFVDPFVWKTIKNHESRKHFLEGFDFLHYDVKTGDFILHFKMNRNLSFQRGLPGFMPAWDIVFEKNETQFDAKGTPFIAGKRIVPVIENHRFTGRYRDLYPANELIALLEEKGIVFRDGSNILPKLLENDDSHAIDTMVALIRSVLQMRNSNAATGEDYINSPVRDLNGVCFDSRFQNPEWPMDADANGAYHIALKGQLLLNHLKESKDLKLQNGISNQDWLAYIQELRNPKKKRKVKLAAALEHHHHHH

SEQ ID NO: 1110 - DNA, 4002 bp, Artificial Sequence
  His-AsCpf1-sNLS-sNLS H800A
  misc_feature (7)..(24): His tag
  misc_feature (3955)..(3975): sNLS
  misc_feature (3982)..(4002): sNLS
atgggccatcatcatcaccatcacggtagcacccagtttgaaggctttaccaatctgtatcaggttagcaaaaccctgcgttttgaactgattccgcagggtaaaaccctgaaacatattcaagaacagggcttcatcgaagaggataaagcacgtaacgatcactacaaagaactgaaaccgattatcgaccgcatctataaaacgtacgcagatcagtgtctgcagctggttcagctggattgggaaaatctgagcgcagcaattgatagttatcgcaaagagaaaaccgaagaaacccgtaatgcactgattgaagaacaggcaacctatcgtaatgccatccatgattatttcattggtcgtaccgataatctgaccgatgcaattaacaaacgtcacgccgaaatctataaaggcctgtttaaagccgaactgtttaatggcaaagttctgaaacagctgggcaccgttaccaccaccgaacatgaaaatgcactgctgcgtagctttgataaattcaccacctatttcagcggcttttatgagaatcgcaaaaacgtgtttagcgcagaagatattagcaccgcaattccgcatcgtattgtgcaggataatttcccgaaattcaaagagaactgccacatttttacccgtctgattaccgcagttccgagcctgcgtgaacattttgaaaacgttaaaaaagccatcggcatctttgttagcaccagcattgaagaagtttttagcttcccgttttacaatcagctgctgacccagacacagattgatctgtataaccagctgttaggtggtattagccgtgaagcaggcaccgaaaaaatcaaaggtctgaatgaagtgctgaatctggccattcagaaaaatgatgaaaccgcacatattattgcaagcctgccgcatcgttttattccgctgtttaagcagattctgagcgatcgtaataccctgagctttattctggaagaattcaaatccgatgaagaggtgattcagagcttctgcaaatacaaaacgctgctgcgcaatgaaaatgttctggaaactgccgaagcactgtttaacgaactgaatagcattgatctgacccacatctttatcagccacaaaaaactggaaaccatttcaagcgcactgtgtgatcattgggataccctgcgtaatgccctgtatgaacgtcgtattagcgaactgaccggtaaaattaccaaaagcgcgaaagaaaaagttcagcgcagtctgaaacatgaggatattaatctgcaagagattattagcgcagccggtaaagaactgtcagaagcatttaaacagaaaaccagcgaaattctgagccatgcacatgcagcactggatcagccgctgccgaccacactgaaaaaacaagaagaaaaagagatcctgaaaagccagctggatagcctgctgggtctgtatcatctgctggactggtttgcagttgatgaaagcaatgaagttgatccggaatttagcgcacgtctgaccggcattaagctggaaatggaaccgagcctgagtttttacaataaagcccgtaattatgccaccaaaaaaccgtatagcgtggaaaaattcaagctgaacttccagatgccgacactggcaagcggttgggatgttaataaagaaaagaacaatggtgccatcctgttcgtgaaaaatggcctgtattatctgggtatcatgccgaaacagaaaggtcgttataaagcactgagctttgaaccgacagaaaaaaccagtgaaggcttcgataaaatgtactatgattactttccggacgcagccaaaatgattccgaaatgcagcacccagctgaaagcagttaccgcacattttcagacccataccacaccgattctgctgagcaataactttattgaaccgctggaaatcaccaaagagatctacgatctgaataacccggaaaaagagccgaaaaagtttcagaccgcctatgcaaaaaaaaccggtgatcagaaaggttatcgtgaagcgctgtgtaaatggattgatttcacccgtgattttctgagcaaatacaccaaaaccaccagtatcgatctgagcagcctgcgtccgagcagccagtataaagatctgggcgaatattatgcagaactgaatccgctgctgtatcatattagctttcagcgtattgccgagaaagaaataatggatgcagttgaaaccggtaagctgtacctgttccagatttataacaaagactttgccaaaggccatcatggtaaaccgaatctgcataccctgtattggaccggtctgtttagccctgaaaatctggcaaaaaccagcattaaactgaatggtcaggcggaactgttttatcgtccgaaaagccgtatgaaacgtatggcagcacgtctgggtgaaaaaatgctgaataaaaagctgaaggatcagaaaaccccgattccggatacactgtatcaagagctgtatgattatgtgaatcatcgtctgagtcatgatctgagtgatgaagcacgtgccctgctgccgaatgttattaccaaagaagttagccacgagatcattaaagatcgtcgttttaccagcgacaagttttttttccatgttccgattacgctgaattatcaggcagcaaatagcccgagcaaatttaaccagcgtgtgaatgcatatctgaaagaacatccggaaacaccgattattggtattgatcgtggtgaacgcaacctgatttatatcaccgttattgatagcaccggcaagatcctggaacagcgtagcctgaataccattcagcagtttgattatcagaaaaagctggacaaccgtgaaaaagaacgtgttgcagcccgtcaggcatggtcagttgttggtacaattaaagacctgaaacagggttatctgagccaggttattcatgaaattgtggatctgatgattcattaccaggcagttgttgtgctggaaaacctgaattttggctttaaaagcaaacgtaccggcattgcggaaaaagcagtttatcagcagttcgaaaagatgctgatcgataaactgaactgtctggtgctgaaagattatccggctgaaaaagttggcggtgttctgaatccgtatcagctgaccgatcagtttaccagctttgcaaaaatgggcacccagagcggatttctgttttatgttccggcaccgtatacgagcaaaattgatccgctgaccggttttgttgatccgtttgtttggaaaaccatcaaaaaccatgaaagccgcaaacattttctggaaggttttgatttcctgcattacgacgttaagaccggtgattttattctgcactttaagatgaatcggaacctgtcatttcagcgtggtctgcctggttttatgcctgcatgggatattgtgtttgagaaaaacgaaacacagttcgatgcaaaaggcaccccgtttattgcaggtaaacgtattgttccggtgattgaaaatcatcgtttcaccggtcgttatcgcgatctgtatccggcaaatgaactgatcgcactgctggaagagaaaggtattgtttttcgtgatggctcaaacattctgccgaaactgttagagaatgatgatagccatgccattgataccatggttgccctgattcgtagcgttctgcagatgcgtaatagcaatgcagcaaccggtgaagattacattaatagtccggttcgtgatctgaatggtgtttgttttgatagccgttttcagaatccggaatggccgatggatgcggatgcaaatggtgcatatcatattgcactgaaaggacagctgctgctgaaccacctgaaagaaagtaaagatttgaagctgcagaatggcattagcaatcaggattggctggcatatatccaagaactgcgtaacggttctcctaagaaaaagcgcaaagttggcagtccgaagaagaaacgtaaggtt

SEQ ID NO: 1111 - DNA, 4089 bp, Artificial Sequence
  Cpf1
  misc_feature (3928)..(3993): NLS
  misc_feature (4072)..(4089): His tag
atgacccagtttgaaggtttcaccaatctgtatcaggttagcaaaaccctgcgttttgaactgattccgcagggtaaaaccctgaaacatattcaagaacagggcttcatcgaagaggataaagcacgtaacgatcactacaaagaactgaaaccgattatcgaccgcatctataaaacctatgcagatcagtgtctgcagctggttcagctggattgggaaaatctgagcgcagcaattgatagttatcgcaaagaaaaaaccgaagaaacccgtaatgcactgattgaagaacaggcaacctatcgtaatgccatccatgattatttcattggtcgtaccgataatctgaccgatgcaattaacaaacgtcacgccgaaatctataaaggcctgtttaaagccgaactgtttaatggcaaagttctgaaacagctgggcaccgttaccaccaccgaacatgaaaatgcactgctgcgtagctttgataaattcaccacctatttcagcggcttttatgagaatcgcaaaaacgtgtttagcgcagaagatattagcaccgcaattccgcatcgtattgtgcaggataatttcccgaaattcaaagagaactgccacatttttacccgtctgattaccgcagttccgagcctgcgtgaacattttgaaaacgttaaaaaagccatcggcatctttgttagcaccagcattgaagaagtttttagcttcccgttttacaatcagctgctgacccagacccagattgatctgtataaccaactgctgggtggtattagccgtgaagcaggcaccgaaaaaatcaaaggtctgaatgaagtgctgaatctggccattcagaaaaatgatgaaaccgcacatattattgcaagcctgccgcatcgttttattccgctgttcaaacaaattctgagcgatcgtaataccctgagctttattctggaagaattcaaatccgatgaagaggtgattcagagcttttgcaaatacaaaacgctgctgcgcaatgaaaatgttctggaaactgccgaagcactgtttaacgaactgaatagcattgatctgacccacatctttatcagccacaaaaaactggaaaccatttcaagcgcactgtgtgatcattgggataccctgcgtaatgccctgtatgaacgtcgtattagcgaactgaccggtaaaattaccaaaagcgcgaaagaaaaagttcagcgcagtctgaaacatgaggatattaatctgcaagagattattagcgcagccggtaaagaactgtcagaagcatttaaacagaaaaccagcgaaattctgtcacatgcacatgcagcactggatcagccgctgccgaccaccctgaaaaaacaagaagaaaaagaaatcctgaaaagccagctggatagcctgctgggtctgtatcatctgctggactggtttgcagttgatgaaagcaatgaagttgatccggaatttagcgcacgtctgaccggcattaaactggaaatggaaccgagcctgagcttttataacaaagcccgtaattatgccaccaaaaaaccgtatagcgtcgaaaaattcaaactgaactttcagcgtccgaccctggcaagcggttgggatgttaataaagaaaaaaacaacggtgccatcctgttcgtgaaaaatggcctgtattatctgggtattatgccgaaacagaaaggtcgttataaagcgctgagctttgaaccgacggaaaaaaccagtgaaggttttgataaaatgtactacgactattttccggatgcagccaaaatgattccgaaatgtagcacccagctgaaagcagttaccgcacattttcagacccataccaccccgattctgctgagcaataactttattgaaccgctggaaatcaccaaagagatctacgatctgaataacccggaaaaagagccgaaaaaattccagaccgcatatgcaaaaaaaaccggtgatcagaaaggttatcgtgaagcgctgtgtaaatggattgatttcacccgtgattttctgagcaaatacaccaaaaccaccagtatcgatctgagcagcctgcgtccgagcagccagtataaagatctgggcgaatattatgcagaactgaatccgctgctgtatcatattagctttcagcgtattgccgagaaagaaatcatggacgcagttgaaaccggtaaactgtacctgttccagatctacaataaagattttgccaaaggccatcatggcaaaccgaatctgcataccctgtattggaccggtctgtttagccctgaaaatctggcaaaaacctcgattaaactgaatggtcaggcggaactgttttatcgtccgaaaagccgtatgaaacgtatggcacatcgtctgggtgaaaaaatgctgaacaaaaaactgaaagaccagaaaaccccgatcccggatacactgtatcaagaactgtatgattatgtgaaccatcgtctgagccatgatctgagtgatgaagcacgtgccctgctgccgaatgttattaccaaagaagttagccacgagatcattaaagatcgtcgttttaccagcgacaaattcctgtttcatgtgccgattaccctgaattatcaggcagcaaatagcccgagcaaatttaaccagcgtgttaatgcatatctgaaagaacatccagaaacgccgattattggtattgatcgtggtgaacgtaacctgatttatatcaccgttattgatagcaccggcaaaatcctggaacagcgtagcctgaataccattcagcagtttgattaccagaaaaaactggataatcgcgagaaagaacgtgttgcagcacgtcaggcatggtcagttgttggtacaattaaagacctgaaacagggttatctgagccaggttattcatgaaattgtggatctgatgattcactatcaggccgttgttgtgctggaaaacctgaattttggctttaaaagcaaacgtaccggcattgcagaaaaagcagtttatcagcagttcgagaaaatgctgattgacaaactgaattgcctggtgctgaaagattatccggctgaaaaagttggtggtgttctgaatccgtatcagctgaccgatcagtttaccagctttgcaaaaatgggcacccagagcggatttctgttttatgttccggcaccgtatacgagcaaaattgatccgctgaccggttttgttgatccgtttgtttggaaaaccatcaaaaaccatgaaagccgcaaacattttctggaaggtttcgattttctgcattacgacgttaaaacgggtgatttcatcctgcactttaaaatgaatcgcaatctgagttttcagcgtggcctgcctggttttatgcctgcatgggatattgtgtttgagaaaaacgaaacacagttcgatgcaaaaggcaccccgtttattgcaggtaaacgtattgttccggtgattgaaaatcatcgtttcaccggtcgttatcgcgatctgtatccggcaaatgaactgatcgcactgctggaagagaaaggtattgtttttcgtgatggctcaaacattctgccgaaactgctggaaaatgatgatagccatgcaattgataccatggttgcactgattcgtagcgttctgcagatgcgtaatagcaatgcagcaaccggtgaagattacattaatagtccggttcgtgatctgaatggtgtttgttttgatagccgttttcagaatccggaatggccgatggatgcagatgcaaatggtgcatatcatattgcactgaaaggacagctgctgctgaaccacctgaaagaaagcaaagatctgaaactgcaaaacggcattagcaatcaggattggctggcatatatccaagaactgcgtaacggtcgtagcagtgatgatgaagcaaccgcagatagccagcatgcagcaccgcctaaaaagaaacgtaaagttggtggtagcggtggttcaggtggtagtggcggtagtggtggctcagggggttctggtggctctggtggtagcctcgagcaccaccaccaccaccac

SEQ ID NO: 1112 - DNA, 4089 bp, Artificial Sequence
  Cpf1
  misc_feature (3928)..(3993): NLS
  misc_feature (4072)..(4089): His tag
atgacccagtttgaaggtttcaccaatctgtatcaggttagcaaaaccctgcgttttgaactgattccgcagggtaaaaccctgaaacatattcaagaacagggcttcatcgaagaggataaagcacgtaacgatcactacaaagaactgaaaccgattatcgaccgcatctataaaacctatgcagatcagtgtctgcagctggttcagctggattgggaaaatctgagcgcagcaattgatagttatcgcaaagaaaaaaccgaagaaacccgtaatgcactgattgaagaacaggcaacctatcgtaatgccatccatgattatttcattggtcgtaccgataatctgaccgatgcaattaacaaacgtcacgccgaaatctataaaggcctgtttaaagccgaactgtttaatggcaaagttctgaaacagctgggcaccgttaccaccaccgaacatgaaaatgcactgctgcgtagctttgataaattcaccacctatttcagcggcttttatgagaatcgcaaaaacgtgtttagcgcagaagatattagcaccgcaattccgcatcgtattgtgcaggataatttcccgaaattcaaagagaactgccacatttttacccgtctgattaccgcagttccgagcctgcgtgaacattttgaaaacgttaaaaaagccatcggcatctttgttagcaccagcattgaagaagtttttagcttcccgttttacaatcagctgctgacccagacccagattgatctgtataaccaactgctgggtggtattagccgtgaagcaggcaccgaaaaaatcaaaggtctgaatgaagtgctgaatctggccattcagaaaaatgatgaaaccgcacatattattgcaagcctgccgcatcgttttattccgctgttcaaacaaattctgagcgatcgtaataccctgagctttattctggaagaattcaaatccgatgaagaggtgattcagagcttttgcaaatacaaaacgctgctgcgcaatgaaaatgttctggaaactgccgaagcactgtttaacgaactgaatagcattgatctgacccacatctttatcagccacaaaaaactggaaaccatttcaagcgcactgtgtgatcattgggataccctgcgtaatgccctgtatgaacgtcgtattagcgaactgaccggtaaaattaccaaaagcgcgaaagaaaaagttcagcgcagtctgaaacatgaggatattaatctgcaagagattattagcgcagccggtaaagaactgtcagaagcatttaaacagaaaaccagcgaaattctgtcacatgcacatgcagcactggatcagccgctgccgaccaccctgaaaaaacaagaagaaaaagaaatcctgaaaagccagctggatagcctgctgggtctgtatcatctgctggactggtttgcagttgatgaaagcaatgaagttgatccggaatttagcgcacgtctgaccggcattaaactggaaatggaaccgagcctgagcttttataacaaagcccgtaattatgccaccaaaaaaccgtatagcgtcgaaaaattcaaactgaactttcagatgccgaccctggcaagcggttgggatgttaataaagaaaaaaacaacggtgccatcctgttcgtgaaaaatggcctgtattatctgggtattatgccgaaacagaaaggtcgttataaagcgctgagctttgaaccgacggaaaaaaccagtgaaggttttgataaaatgtactacgactattttccggatgcagccaaaatgattccgaaatgtagcacccagctgaaagcagttaccgcacattttcagacccataccaccccgattctgctgagcaataactttattgaaccgctggaaatcaccaaagagatctacgatctgaataacccggaaaaagagccgaaaaaattccagaccgcatatgcaaaaaaaaccggtgatcagaaaggttatcgtgaagcgctgtgtaaatggattgatttcacccgtgattttctgagcaaatacaccaaaaccaccagtatcgatctgagcagcctgcgtccgagcagccagtataaagatctgggcgaatattatgcagaactgaatccgctgctgtatcatattagctttcagcgtattgccgagaaagaaatcatggacgcagttgaaaccggtaaactgtacctgttccagatctacaataaagattttgccaaaggccatcatggcaaaccgaatctgcataccctgtattggaccggtctgtttagccctgaaaatctggcaaaaacctcgattaaactgaatggtcaggcggaactgttttatcgtccgaaaagccgtatgaaacgtatggcacatcgtctgggtgaaaaaatgctgaacaaaaaactgaaagaccagaaaaccccgatcccggatacactgtatcaagaactgtatgattatgtgaaccatcgtctgagccatgatctgagtgatgaagcacgtgccctgctgccgaatgttattaccaaagaagttagccacgagatcattaaagatcgtcgttttaccagcgacaaattcttttttcatgtgccgattaccctgaattatcaggcagcaaatagcccgagcaaatttaaccagcgtgttaatgcatatctgaaagaacatccagaaacgccgattattggtattgatcgtggtgaacgtaacctgatttatatcaccgttattgatagcaccggcaaaatcctggaacagcgtagcctgaataccattcagcagtttgattaccagaaaaaactggataatcgcgagaaagaacgtgttgcagcacgtcaggcatggtcagttgttggtacaattaaagacctgaaacagggttatctgagccaggttattcatgaaattgtggatctgatgattcactatcaggccgttgttgtgctggaaaacctgaattttggctttaaaagcaaacgtaccggcattgcagaaaaagcagtttatcagcagttcgagaaaatgctgattgacaaactgaattgcctggtgctgaaagattatccggctgaaaaagttggtggtgttctgaatccgtatcagctgaccgatcagtttaccagctttgcaaaaatgggcacccagagcggatttctgttttatgttccggcaccgtatacgagcaaaattgatccgctgaccggttttgttgatccgtttgtttggaaaaccatcaaaaaccatgaaagccgcaaacattttctggaaggtttcgattttctgcattacgacgttaaaacgggtgatttcatcctgcactttaaaatgaatcgcaatctgagttttcagcgtggcctgcctggttttatgcctgcatgggatattgtgtttgagaaaaacgaaacacagttcgatgcaaaaggcaccccgtttattgcaggtaaacgtattgttccggtgattgaaaatcatcgtttcaccggtcgttatcgcgatctgtatccggcaaatgaactgatcgcactgctggaagagaaaggtattgtttttcgtgatggctcaaacattctgccgaaactgctggaaaatgatgatagccatgcaattgataccatggttgcactgattcgtagcgttctgcagatgcgtaatagcaatgcagcaaccggtgaagattacattaatagtccggttcgtgatctgaatggtgtttgttttgatagccgttttcagaatccggaatggccgatggatgcagatgcaaatggtgcatatcatattgcactgaaaggacagctgctgctgaaccacctgaaagaaagcaaagatctgaaactgcaaaacggcattagcaatcaggattggctggcatatatccaagaactgcgtaacggtcgtagcagtgatgatgaagcaaccgcagatagccagcatgcagcaccgcctaaaaagaaacgtaaagttggtggtagcggtggttcaggtggtagtggcggtagtggtggctcagggggttctggtggctctggtggtagcctcgagcaccaccaccaccaccac

SEQ ID NO: 1113 - DNA, 4089 bp, Artificial Sequence
  Cpf1
  misc_feature (3928)..(3993): NLS
  misc_feature (4072)..(4089): His tag
atgacccagtttgaaggtttcaccaatctgtatcaggttagcaaaaccctgcgttttgaactgattccgcagggtaaaaccctgaaacatattcaagaacagggcttcatcgaagaggataaagcacgtaacgatcactacaaagaactgaaaccgattatcgaccgcatctataaaacctatgcagatcagtgtctgcagctggttcagctggattgggaaaatctgagcgcagcaattgatagttatcgcaaagaaaaaaccgaagaaacccgtaatgcactgattgaagaacaggcaacctatcgtaatgccatccatgattatttcattggtcgtaccgataatctgaccgatgcaattaacaaacgtcacgccgaaatctataaaggcctgtttaaagccgaactgtttaatggcaaagttctgaaacagctgggcaccgttaccaccaccgaacatgaaaatgcactgctgcgtagctttgataaattcaccacctatttcagcggcttttatgagaatcgcaaaaacgtgtttagcgcagaagatattagcaccgcaattccgcatcgtattgtgcaggataatttcccgaaattcaaagagaactgccacatttttacccgtctgattaccgcagttccgagcctgcgtgaacattttgaaaacgttaaaaaagccatcggcatctttgttagcaccagcattgaagaagtttttagcttcccgttttacaatcagctgctgacccagacccagattgatctgtataaccaactgctgggtggtattagccgtgaagcaggcaccgaaaaaatcaaaggtctgaatgaagtgctgaatctggccattcagaaaaatgatgaaaccgcacatattattgcaagcctgccgcatcgttttattccgctgttcaaacaaattctgagcgatcgtaataccctgagctttattctggaagaattcaaatccgatgaagaggtgattcagagcttttgcaaatacaaaacgctgctgcgcaatgaaaatgttctggaaactgccgaagcactgtttaacgaactgaatagcattgatctgacccacatctttatcagccacaaaaaactggaaaccatttcaagcgcactgtgtgatcattgggataccctgcgtaatgccctgtatgaacgtcgtattagcgaactgaccggtaaaattaccaaaagcgcgaaagaaaaagttcagcgcagtctgaaacatgaggatattaatctgcaagagattattagcgcagccggtaaagaactgtcagaagcatttaaacagaaaaccagcgaaattctgtcacatgcacatgcagcactggatcagccgctgccgaccaccctgaaaaaacaagaagaaaaagaaatcctgaaaagccagctggatagcctgctgggtctgtatcatctgctggactggtttgcagttgatgaaagcaatgaagttgatccggaatttagcgcacgtctgaccggcattaaactggaaatggaaccgagcctgagcttttataacaaagcccgtaattatgccaccaaaaaaccgtatagcgtcgaaaaattcaaactgaactttcagcgtccgaccctggcaagcggttgggatgttaataaagaaaaaaacaacggtgccatcctgttcgtgaaaaatggcctgtattatctgggtattatgccgaaacagaaaggtcgttataaagcgctgagctttgaaccgacggaaaaaaccagtgaaggttttgataaaatgtactacgactattttccggatgcagccaaaatgattccgaaatgtagcacccagctgaaagcagttaccgcacattttcagacccataccaccccgattctgctgagcaataactttattgaaccgctggaaatcaccaaagagatctacgatctgaataacccggaaaaagagccgaaaaaattccagaccgcatatgcaaaaaaaaccggtgatcagaaaggttatcgtgaagcgctgtgtaaatggattgatttcacccgtgattttctgagcaaatacaccaaaaccaccagtatcgatctgagcagcctgcgtccgagcagccagtataaagatctgggcgaatattatgcagaactgaatccgctgctgtatcatattagctttcagcgtattgccgagaaagaaatcatggacgcagttgaaaccggtaaactgtacctgttccagatctacaataaagattttgccaaaggccatcatggcaaaccgaatctgcataccctgtattggaccggtctgtttagccctgaaaatctggcaaaaacctcgattaaactgaatggtcaggcggaactgttttatcgtccgaaaagccgtatgaaacgtatggcagctcgtctgggtgaaaaaatgctgaacaaaaaactgaaagaccagaaaaccccgatcccggatacactgtatcaagaactgtatgattatgtgaaccatcgtctgagccatgatctgagtgatgaagcacgtgccctgctgccgaatgttattaccaaagaagttagccacgagatcattaaagatcgtcgttttaccagcgacaaattcctgtttcatgtgccgattaccctgaattatcaggcagcaaatagcccgagcaaatttaaccagcgtgttaatgcatatctgaaagaacatccagaaacgccgattattggtattgatcgtggtgaacgtaacctgatttatatcaccgttattgatagcaccggcaaaatcctggaacagcgtagcctgaataccattcagcagtttgattaccagaaaaaactggataatcgcgagaaagaacgtgttgcagcacgtcaggcatggtcagttgttggtacaattaaagacctgaaacagggttatctgagccaggttattcatgaaattgtggatctgatgattcactatcaggccgttgttgtgctggaaaacctgaattttggctttaaaagcaaacgtaccggcattgcagaaaaagcagtttatcagcagttcgagaaaatgctgattgacaaactgaattgcctggtgctgaaagattatccggctgaaaaagttggtggtgttctgaatccgtatcagctgaccgatcagtttaccagctttgcaaaaatgggcacccagagcggatttctgttttatgttccggcaccgtatacgagcaaaattgatccgctgaccggttttgttgatccgtttgtttggaaaaccatcaaaaaccatgaaagccgcaaacattttctggaaggtttcgattttctgcattacgacgttaaaacgggtgatttcatcctgcactttaaaatgaatcgcaatctgagttttcagcgtggcctgcctggttttatgcctgcatgggatattgtgtttgagaaaaacgaaacacagttcgatgcaaaaggcaccccgtttattgcaggtaaacgtattgttccggtgattgaaaatcatcgtttcaccggtcgttatcgcgatctgtatccggcaaatgaactgatcgcactgctggaagagaaaggtattgtttttcgtgatggctcaaacattctgccgaaactgctggaaaatgatgatagccatgcaattgataccatggttgcactgattcgtagcgttctgcagatgcgtaatagcaatgcagcaaccggtgaagattacattaatagtccggttcgtgatctgaatggtgtttgttttgatagccgttttcagaatccggaatggccgatggatgcagatgcaaatggtgcatatcatattgcactgaaaggacagctgctgctgaaccacctgaaagaaagcaaagatctgaaactgcaaaacggcattagcaatcaggattggctggcatatatccaagaactgcgtaacggtcgtagcagtgatgatgaagcaaccgcagatagccagcatgcagcaccgcctaaaaagaaacgtaaagttggtggtagcggtggttcaggtggtagtggcggtagtggtggctcagggggttctggtggctctggtggtagcctcgagcaccaccaccaccaccac

SEQ ID NO: 1114 - DNA, 3993 bp, Artificial Sequence
  Cpf1
  misc_feature (3928)..(3993): NLS
atgacccagtttgaaggtttcaccaatctgtatcaggttagcaaaaccctgcgttttgaactgattccgcagggtaaaaccctgaaacatattcaagaacagggcttcatcgaagaggataaagcacgtaacgatcactacaaagaactgaaaccgattatcgaccgcatctataaaacctatgcagatcagtgtctgcagctggttcagctggattgggaaaatctgagcgcagcaattgatagttatcgcaaagaaaaaaccgaagaaacccgtaatgcactgattgaagaacaggcaacctatcgtaatgccatccatgattatttcattggtcgtaccgataatctgaccgatgcaattaacaaacgtcacgccgaaatctataaaggcctgtttaaagccgaactgtttaatggcaaagttctgaaacagctgggcaccgttaccaccaccgaacatgaaaatgcactgctgcgtagctttgataaattcaccacctatttcagcggcttttatgagaatcgcaaaaacgtgtttagcgcagaagatattagcaccgcaattccgcatcgtattgtgcaggataatttcccgaaattcaaagagaactgccacatttttacccgtctgattaccgcagttccgagcctgcgtgaacattttgaaaacgttaaaaaagccatcggcatctttgttagcaccagcattgaagaagtttttagcttcccgttttacaatcagctgctgacccagacccagattgatctgtataaccaactgctgggtggtattagccgtgaagcaggcaccgaaaaaatcaaaggtctgaatgaagtgctgaatctggccattcagaaaaatgatgaaaccgcacatattattgcaagcctgccgcatcgttttattccgctgttcaaacaaattctgagcgatcgtaataccctgagctttattctggaagaattcaaatccgatgaagaggtgattcagagcttttgcaaatacaaaacgctgctgcgcaatgaaaatgttctggaaactgccgaagcactgtttaacgaactgaatagcattgatctgacccacatctttatcagccacaaaaaactggaaaccatttcaagcgcactgtgtgatcattgggataccctgcgtaatgccctgtatgaacgtcgtattagcgaactgaccggtaaaattaccaaaagcgcgaaagaaaaagttcagcgcagtctgaaacatgaggatattaatctgcaagagattattagcgcagccggtaaagaactgtcagaagcatttaaacagaaaaccagcgaaattctgtcacatgcacatgcagcactggatcagccgctgccgaccaccctgaaaaaacaagaagaaaaagaaatcctgaaaagccagctggatagcctgctgggtctgtatcatctgctggactggtttgcagttgatgaaagcaatgaagttgatccggaatttagcgcacgtctgaccggcattaaactggaaatggaaccgagcctgagcttttataacaaagcccgtaattatgccaccaaaaaaccgtatagcgtcgaaaaattcaaactgaactttcagcgtccgaccctggcaagcggttgggatgttaataaagaaaaaaacaacggtgccatcctgttcgtgaaaaatggcctgtattatctgggtattatgccgaaacagaaaggtcgttataaagcgctgagctttgaaccgacggaaaaaaccagtgaaggttttgataaaatgtactacgactattttccggatgcagccaaaatgattccgaaatgtagcacccagctgaaagcagttaccgcacattttcagacccataccaccccgattctgctgagcaataactttattgaaccgctggaaatcaccaaagagatctacgatctgaataacccggaaaaagagccgaaaaaattccagaccgcatatgcaaaaaaaaccggtgatcagaaaggttatcgtgaagcgctgtgtaaatggattgatttcacccgtgattttctgagcaaatacaccaaaaccaccagtatcgatctgagcagcctgcgtccgagcagccagtataaagatctgggcgaatattatgcagaactgaatccgctgctgtatcatattagctttcagcgtattgccgagaaagaaatcatggacgcagttgaaaccggtaaactgtacctgttccagatctacaataaagattttgccaaaggccatcatggcaaaccgaatctgcataccctgtattggaccggtctgtttagccctgaaaatctggcaaaaacctcgattaaactgaatggtcaggcggaactgttttatcgtccgaaaagccgtatgaaacgtatggcagctcgtctgggtgaaaaaatgctgaacaaaaaactgaaagaccagaaaaccccgatcccggatacactgtatcaagaactgtatgattatgtgaaccatcgtctgagccatgatctgagtgatgaagcacgtgccctgctgccgaatgttattaccaaagaagttagccacgagatcattaaagatcgtcgttttaccagcgacaaattcctgtttcatgtgccgattaccctgaattatcaggcagcaaatagcccgagcaaatttaaccagcgtgttaatgcatatctgaaagaacatccagaaacgccgattattggtattgatcgtggtgaacgtaacctgatttatatcaccgttattgatagcaccggcaaaatcctggaacagcgtagcctgaataccattcagcagtttgattaccagaaaaaactggataatcgcgagaaagaacgtgttgcagcacgtcaggcatggtcagttgttggtacaattaaagacctgaaacagggttatctgagccaggttattcatgaaattgtggatctgatgattcactatcaggccgttgttgtgctggaaaacctgaattttggctttaaaagcaaacgtaccggcattgcagaaaaagcagtttatcagcagttcgagaaaatgctgattgacaaactgaattgcctggtgctgaaagattatccggctgaaaaagttggtggtgttctgaatccgtatcagctgaccgatcagtttaccagctttgcaaaaatgggcacccagagcggatttctgttttatgttccggcaccgtatacgagcaaaattgatccgctgaccggttttgttgatccgtttgtttggaaaaccatcaaaaaccatgaaagccgcaaacattttctggaaggtttcgattttctgcattacgacgttaaaacgggtgatttcatcctgcactttaaaatgaatcgcaatctgagttttcagcgtggcctgcctggttttatgcctgcatgggatattgtgtttgagaaaaacgaaacacagttcgatgcaaaaggcaccccgtttattgcaggtaaacgtattgttccggtgattgaaaatcatcgtttcaccggtcgttatcgcgatctgtatccggcaaatgaactgatcgcactgctggaagagaaaggtattgtttttcgtgatggctcaaacattctgccgaaactgctggaaaatgatgatagccatgcaattgataccatggttgcactgattcgtagcgttctgcagatgcgtaatagcaatgcagcaaccggtgaagattacattaatagtccggttcgtgatctgaatggtgtttgttttgatagccgttttcagaatccggaatggccgatggatgcagatgcaaatggtgcatatcatattgcactgaaaggacagctgctgctgaaccacctgaaagaaagcaaagatctgaaactgcaaaacggcattagcaatcaggattggctggcatatatccaagaactgcgtaacggtcgtagcagtgatgatgaagcaaccgcagatagccagcatgcagcaccgcctaaaaagaaacgtaaagtt

SEQ ID NO: 1115 - DNA, 3993 bp, Artificial Sequence
  Cpf1
  misc_feature (3928)..(3993): NLS
agcacccagtttgaaggtttcaccaatctgtatcaggttagcaaaaccctgcgttttgaactgattccgcagggtaaaaccctgaaacatattcaagaacagggcttcatcgaagaggataaagcacgtaacgatcactacaaagaactgaaaccgattatcgaccgcatctataaaacctatgcagatcagtgtctgcagctggttcagctggattgggaaaatctgagcgcagcaattgatagttatcgcaaagaaaaaaccgaagaaacccgtaatgcactgattgaagaacaggcaacctatcgtaatgccatccatgattatttcattggtcgtaccgataatctgaccgatgcaattaacaaacgtcacgccgaaatctataaaggcctgtttaaagccgaactgtttaatggcaaagttctgaaacagctgggcaccgttaccaccaccgaacatgaaaatgcactgctgcgtagctttgataaattcaccacctatttcagcggcttttatgagaatcgcaaaaacgtgtttagcgcagaagatattagcaccgcaattccgcatcgtattgtgcaggataatttcccgaaattcaaagagaactgccacatttttacccgtctgattaccgcagttccgagcctgcgtgaacattttgaaaacgttaaaaaagccatcggcatctttgttagcaccagcattgaagaagtttttagcttcccgttttacaatcagctgctgacccagacccagattgatctgtataaccaactgctgggtggtattagccgtgaagcaggcaccgaaaaaatcaaaggtctgaatgaagtgctgaatctggccattcagaaaaatgatgaaaccgcacatattattgcaagcctgccgcatcgttttattccgctgttcaaacaaattctgagcgatcgtaataccctgagctttattctggaagaattcaaatccgatgaagaggtgattcagagcttttgcaaatacaaaacgctgctgcgcaatgaaaatgttctggaaactgccgaagcactgtttaacgaactgaatagcattgatctgacccacatctttatcagccacaaaaaactggaaaccatttcaagcgcactgtgtgatcattgggataccctgcgtaatgccctgtatgaacgtcgtattagcgaactgaccggtaaaattaccaaaagcgcgaaagaaaaagttcagcgcagtctgaaacatgaggatattaatctgcaagagattattagcgcagccggtaaagaactgtcagaagcatttaaacagaaaaccagcgaaattctgtcacatgcacatgcagcactggatcagccgctgccgaccaccctgaaaaaacaagaagaaaaagaaatcctgaaaagccagctggatagcctgctgggtctgtatcatctgctggactggtttgcagttgatgaaagcaatgaagttgatccggaatttagcgcacgtctgaccggcattaaactggaaatggaaccgagcctgagcttttataacaaagcccgtaattatgccaccaaaaaaccgtatagcgtcgaaaaattcaaactgaactttcagcgtccgaccctggcaagcggttgggatgttaataaagaaaaaaacaacggtgccatcctgttcgtgaaaaatggcctgtattatctgggtattatgccgaaacagaaaggtcgttataaagcgctgagctttgaaccgacggaaaaaaccagtgaaggttttgataaaatgtactacgactattttccggatgcagccaaaatgattccgaaatgtagcacccagctgaaagcagttaccgcacattttcagacccataccaccccgattctgctgagcaataactttattgaaccgctggaaatcaccaaagagatctacgatctgaataacccggaaaaagagccgaaaaaattccagaccgcatatgcaaaaaaaaccggtgatcagaaaggttatcgtgaagcgctgtgtaaatggattgatttcacccgtgattttctgagcaaatacaccaaaaccaccagtatcgatctgagcagcctgcgtccgagcagccagtataaagatctgggcgaatattatgcagaactgaatccgctgctgtatcatattagctttcagcgtattgccgagaaagaaatcatggacgcagttgaaaccggtaaactgtacctgttccagatctacaataaagattttgccaaaggccatcatggcaaaccgaatctgcataccctgtattggaccggtctgtttagccctgaaaatctggcaaaaacctcgattaaactgaatggtcaggcggaactgttttatcgtccgaaaagccgtatgaaacgtatggcacatcgtctgggtgaaaaaatgctgaacaaaaaactgaaagaccagaaaaccccgatcccggatacactgtatcaagaactgtatgattatgtgaaccatcgtctgagccatgatctgagtgatgaagcacgtgccctgctgccgaatgttattaccaaagaagttagccacgagatcattaaagatcgtcgttttaccagcgacaaattcctgtttcatgtgccgattaccctgaattatcaggcagcaaatagcccgagcaaatttaaccagcgtgttaatgcatatctgaaagaacatccagaaacgccgattattggtattgatcgtggtgaacgtaacctgatttatatcaccgttattgatagcaccggcaaaatcctggaacagcgtagcctgaataccattcagcagtttgattaccagaaaaaactggataatcgcgagaaagaacgtgttgcagcacgtcaggcatggtcagttgttggtacaattaaagacctgaaacagggttatctgagccaggttattcatgaaattgtggatctgatgattcactatcaggccgttgttgtgctggaaaacctgaattttggctttaaaagcaaacgtaccggcattgcagaaaaagcagtttatcagcagttcgagaaaatgctgattgacaaactgaattgcctggtgctgaaagattatccggctgaaaaagttggtggtgttctgaatccgtatcagctgaccgatcagtttaccagctttgcaaaaatgggcacccagagcggatttctgttttatgttccggcaccgtatacgagcaaaattgatccgctgaccggttttgttgatccgtttgtttggaaaaccatcaaaaaccatgaaagccgcaaacattttctggaaggtttcgattttctgcattacgacgttaaaacgggtgatttcatcctgcactttaaaatgaatcgcaatctgagttttcagcgtggcctgcctggttttatgcctgcatgggatattgtgtttgagaaaaacgaaacacagttcgatgcaaaaggcaccccgtttattgcaggtaaacgtattgttccggtgattgaaaatcatcgtttcaccggtcgttatcgcgatctgtatccggcaaatgaactgatcgcactgctggaagagaaaggtattgtttttcgtgatggctcaaacattctgccgaaactgctggaaaatgatgatagccatgcaattgataccatggttgcactgattcgtagcgttctgcagatgcgtaatagcaatgcagcaaccggtgaagattacattaatagtccggttcgtgatctgaatggtgtttgttttgatagccgttttcagaatccggaatggccgatggatgcagatgcaaatggtgcatatcatattgcactgaaaggacagctgctgctgaaccacctgaaagaaagcaaagatctgaaactgcaaaacggcattagcaatcaggattggctggcatatatccaagaactgcgtaacggtcgtagcagtgatgatgaagcaaccgcagatagccagcatgcagcaccgcctaaaaagaaacgtaaagtt

SEQ ID NO: 1116 - DNA, 4089 bp, Artificial Sequence
  Cpf1
  misc_feature (3928)..(3993): NLS
  misc_feature (4072)..(4089): His tag
agcacccagtttgaaggtttcaccaatctgtatcaggttagcaaaaccctgcgttttgaactgattccgcagggtaaaaccctgaaacatattcaagaacagggcttcatcgaagaggataaagcacgtaacgatcactacaaagaactgaaaccgattatcgaccgcatctataaaacctatgcagatcagtgtctgcagctggttcagctggattgggaaaatctgagcgcagcaattgatagttatcgcaaagaaaaaaccgaagaaacccgtaatgcactgattgaagaacaggcaacctatcgtaatgccatccatgattatttcattggtcgtaccgataatctgaccgatgcaattaacaaacgtcacgccgaaatctataaaggcctgtttaaagccgaactgtttaatggcaaagttctgaaacagctgggcaccgttaccaccaccgaacatgaaaatgcactgctgcgtagctttgataaattcaccacctatttcagcggcttttatgagaatcgcaaaaacgtgtttagcgcagaagatattagcaccgcaattccgcatcgtattgtgcaggataatttcccgaaattcaaagagaactgccacatttttacccgtctgattaccgcagttccgagcctgcgtgaacattttgaaaacgttaaaaaagccatcggcatctttgttagcaccagcattgaagaagtttttagcttcccgttttacaatcagctgctgacccagacccagattgatctgtataaccaactgctgggtggtattagccgtgaagcaggcaccgaaaaaatcaaaggtctgaatgaagtgctgaatctggccattcagaaaaatgatgaaaccgcacatattattgcaagcctgccgcatcgttttattccgctgttcaaacaaattctgagcgatcgtaataccctgagctttattctggaagaattcaaatccgatgaagaggtgattcagagcttttgcaaatacaaaacgctgctgcgcaatgaaaatgttctggaaactgccgaagcactgtttaacgaactgaatagcattgatctgacccacatctttatcagccacaaaaaactggaaaccatttcaagcgcactgtgtgatcattgggataccctgcgtaatgccctgtatgaacgtcgtattagcgaactgaccggtaaaattaccaaaagcgcgaaagaaaaagttcagcgcagtctgaaacatgaggatattaatctgcaagagattattagcgcagccggtaaagaactgtcagaagcatttaaacagaaaaccagcgaaattctgtcacatgcacatgcagcactggatcagccgctgccgaccaccctgaaaaaacaagaagaaaaagaaatcctgaaaagccagctggatagcctgctgggtctgtatcatctgctggactggtttgcagttgatgaaagcaatgaagttgatccggaatttagcgcacgtctgaccggcattaaactggaaatggaaccgagcctgagcttttataacaaagcccgtaattatgccaccaaaaaaccgtatagcgtcgaaaaattcaaactgaactttcagcgtccgaccctggcaagcggttgggatgttaataaagaaaaaaacaacggtgccatcctgttcgtgaaaaatggcctgtattatctgggtattatgccgaaacagaaaggtcgttataaagcgctgagctttgaaccgacggaaaaaaccagtgaaggttttgataaaatgtactacgactattttccggatgcagccaaaatgattccgaaatgtagcacccagctgaaagcagttaccgcacattttcagacccataccaccccgattctgctgagcaataactttattgaaccgctggaaatcaccaaagagatctacgatctgaataacccggaaaaagagccgaaaaaattccagaccgcatatgcaaaaaaaaccggtgatcagaaaggttatcgtgaagcgctgtgtaaatggattgatttcacccgtgattttctgagcaaatacaccaaaaccaccagtatcgatctgagcagcctgcgtccgagcagccagtataaagatctgggcgaatattatgcagaactgaatccgctgctgtatcatattagctttcagcgtattgccgagaaagaaatcatggacgcagttgaaaccggtaaactgtacctgttccagatctacaataaagattttgccaaaggccatcatggcaaaccgaatctgcataccctgtattggaccggtctgtttagccctgaaaatctggcaaaaacctcgattaaactgaatggtcaggcggaactgttttatcgtccgaaaagccgtatgaaacgtatggcacatcgtctgggtgaaaaaatgctgaacaaaaaactgaaagaccagaaaaccccgatcccggatacactgtatcaagaactgtatgattatgtgaaccatcgtctgagccatgatctgagtgatgaagcacgtgccctgctgccgaatgttattaccaaagaagttagccacgagatcattaaagatcgtcgttttaccagcgacaaattcctgtttcatgtgccgattaccctgaattatcaggcagcaaatagcccgagcaaatttaaccagcgtgttaatgcatatctgaaagaacatccagaaacgccgattattggtattgatcgtggtgaacgtaacctgatttatatcaccgttattgatagcaccggcaaaatcctggaacagcgtagcctgaataccattcagcagtttgattaccagaaaaaactggataatcgcgagaaagaacgtgttgcagcacgtcaggcatggtcagttgttggtacaattaaagacctgaaacagggttatctgagccaggttattcatgaaattgtggatctgatgattcactatcaggccgttgttgtgctggaaaacctgaattttggctttaaaagcaaacgtaccggcattgcagaaaaagcagtttatcagcagttcgagaaaatgctgattgacaaactgaattgcctggtgctgaaagattatccggctgaaaaagttggtggtgttctgaatccgtatcagctgaccgatcagtttaccagctttgcaaaaatgggcacccagagcggatttctgttttatgttccggcaccgtatacgagcaaaattgatccgctgaccggttttgttgatccgtttgtttggaaaaccatcaaaaaccatgaaagccgcaaacattttctggaaggtttcgattttctgcattacgacgttaaaacgggtgatttcatcctgcactttaaaatgaatcgcaatctgagttttcagcgtggcctgcctggttttatgcctgcatgggatattgtgtttgagaaaaacgaaacacagttcgatgcaaaaggcaccccgtttattgcaggtaaacgtattgttccggtgattgaaaatcatcgtttcaccggtcgttatcgcgatctgtatccggcaaatgaactgatcgcactgctggaagagaaaggtattgtttttcgtgatggctcaaacattctgccgaaactgctggaaaatgatgatagccatgcaattgataccatggttgcactgattcgtagcgttctgcagatgcgtaatagcaatgcagcaaccggtgaagattacattaatagtccggttcgtgatctgaatggtgtttgttttgatagccgttttcagaatccggaatggccgatggatgcagatgcaaatggtgcatatcatattgcactgaaaggacagctgctgctgaaccacctgaaagaaagcaaagatctgaaactgcaaaacggcattagcaatcaggattggctggcatatatccaagaactgcgtaacggtcgtagcagtgatgatgaagcaaccgcagatagccagcatgcagcaccgcctaaaaagaaacgtaaagttggtggtagcggtggttcaggtggtagtggcggtagtggtggctcagggggttctggtggctctggtggtagcctcgagcaccaccaccaccaccac

SEQ ID NO: 1117 - DNA, 4083 bp, Artificial Sequence
  Cpf1
  misc_feature (4024)..(4044): NLS
  misc_feature (4066)..(4083): His tag
atgggtcgggatccaggtaaaccgattccgaatccgctgctgggtctggatagcaccgcaccgaaaaaaaaacgtaaagttggtattcatggtgttccggcagcaacccagtttgaaggtttcaccaatctgtatcaggttagcaaaaccctgcgttttgaactgattccgcagggtaaaaccctgaaacatattcaagaacagggcttcatcgaagaggataaagcacgtaacgatcactacaaagaactgaaaccgattatcgaccgcatctataaaacctatgcagatcagtgtctgcagctggttcagctggattgggaaaatctgagcgcagcaattgatagttatcgcaaagaaaaaaccgaagaaacccgtaatgcactgattgaagaacaggcaacctatcgtaatgccatccatgattatttcattggtcgtaccgataatctgaccgatgcaattaacaaacgtcacgccgaaatctataaaggcctgtttaaagccgaactgtttaatggcaaagttctgaaacagctgggcaccgttaccaccaccgaacatgaaaatgcactgctgcgtagctttgataaattcaccacctatttcagcggcttttatgagaatcgcaaaaacgtgtttagcgcagaagatattagcaccgcaattccgcatcgtattgtgcaggataatttcccgaaattcaaagagaactgccacatttttacccgtctgattaccgcagttccgagcctgcgtgaacattttgaaaacgttaaaaaagccatcggcatctttgttagcaccagcattgaagaagtttttagcttcccgttttacaatcagctgctgacccagacccagattgatctgtataaccaactgctgggtggtattagccgtgaagcaggcaccgaaaaaatcaaaggtctgaatgaagtgctgaatctggccattcagaaaaatgatgaaaccgcacatattattgcaagcctgccgcatcgttttattccgctgttcaaacaaattctgagcgatcgtaataccctgagctttattctggaagaattcaaatccgatgaagaggtgattcagagcttttgcaaatacaaaacgctgctgcgcaatgaaaatgttctggaaactgccgaagcactgtttaacgaactgaatagcattgatctgacccacatctttatcagccacaaaaaactggaaaccatttcaagcgcactgtgtgatcattgggataccctgcgtaatgccctgtatgaacgtcgtattagcgaactgaccggtaaaattaccaaaagcgcgaaagaaaaagttcagcgcagtctgaaacatgaggatattaatctgcaagagattattagcgcagccggtaaagaactgtcagaagcatttaaacagaaaaccagcgaaattctgtcacatgcacatgcagcactggatcagccgctgccgaccaccctgaaaaaacaagaagaaaaagaaatcctgaaaagccagctggatagcctgctgggtctgtatcatctgctggactggtttgcagttgatgaaagcaatgaagttgatccggaatttagcgcacgtctgaccggcattaaactggaaatggaaccgagcctgagcttttataacaaagcccgtaattatgccaccaaaaaaccgtatagcgtcgaaaaattcaaactgaactttcagatgccgaccctggcaagcggttgggatgttaataaagaaaaaaacaacggtgccatcctgttcgtgaaaaatggcctgtattatctgggtattatgccgaaacagaaaggtcgttataaagcgctgagctttgaaccgacggaaaaaaccagtgaaggttttgataaaatgtactacgactattttccggatgcagccaaaatgattccgaaatgtagcacccagctgaaagcagttaccgcacattttcagacccataccaccccgattctgctgagcaataactttattgaaccgctggaaatcaccaaagagatctacgatctgaataacccggaaaaagagccgaaaaaattccagaccgcatatgcaaaaaaaaccggtgatcagaaaggttatcgtgaagcgctgtgtaaatggattgatttcacccgtgattttctgagcaaatacaccaaaaccaccagtatcgatctgagcagcctgcgtccgagcagccagtataaagatctgggcgaatattatgcagaactgaatccgctgctgtatcatattagctttcagcgtattgccgagaaagaaatcatggacgcagttgaaaccggtaaactgtacctgttccagatctacaataaagattttgccaaaggccatcatggcaaaccgaatctgcataccctgtattggaccggtctgtttagccctgaaaatctggcaaaaacctcgattaaactgaatggtcaggcggaactgttttatcgtccgaaaagccgtatgaaacgtatggcacatcgtctgggtgaaaaaatgctgaacaaaaaactgaaagaccagaaaaccccgatcccggatacactgtatcaagaactgtatgattatgtgaaccatcgtctgagccatgatctgagtgatgaagcacgtgccctgctgccgaatgttattaccaaagaagttagccacgagatcattaaagatcgtcgttttaccagcgacaaattcttttttcatgtgccgattaccctgaattatcaggcagcaaatagcccgagcaaatttaaccagcgtgttaatgcatatctgaaagaacatccagaaacgccgattattggtattgatcgtggtgaacgtaacctgatttatatcaccgttattgatagcaccggcaaaatcctggaacagcgtagcctgaataccattcagcagtttgattaccagaaaaaactggataatcgcgagaaagaacgtgttgcagcacgtcaggcatggtcagttgttggtacaattaaagacctgaaacagggttatctgagccaggttattcatgaaattgtggatctgatgattcactatcaggccgttgttgtgctggaaaacctgaattttggctttaaaagcaaacgtaccggcattgcagaaaaagcagtttatcagcagttcgagaaaatgctgattgacaaactgaattgcctggtgctgaaagattatccggctgaaaaagttggtggtgttctgaatccgtatcagctgaccgatcagtttaccagctttgcaaaaatgggcacccagagcggatttctgttttatgttccggcaccgtatacgagcaaaattgatccgctgaccggttttgttgatccgtttgtttggaaaaccatcaaaaaccatgaaagccgcaaacattttctggaaggtttcgattttctgcattacgacgttaaaacgggtgatttcatcctgcactttaaaatgaatcgcaatctgagttttcagcgtggcctgcctggttttatgcctgcatgggatattgtgtttgagaaaaacgaaacacagttcgatgcaaaaggcaccccgtttattgcaggtaaacgtattgttccggtgattgaaaatcatcgtttcaccggtcgttatcgcgatctgtatccggcaaatgaactgatcgcactgctggaagagaaaggtattgtttttcgtgatggctcaaacattctgccgaaactgctggaaaatgatgatagccatgcaattgataccatggttgcactgattcgtagcgttctgcagatgcgtaatagcaatgcagcaaccggtgaagattacattaatagtccggttcgtgatctgaatggtgtttgttttgatagccgttttcagaatccggaatggccgatggatgcagatgcaaatggtgcatatcatattgcactgaaaggacagctgctgctgaaccacctgaaagaaagcaaagatctgaaactgcaaaacggcattagcaatcaggattggctggcatatatccaagaactgcgtaaccctaaaaaaaaacgcaaagtgaagcttgcggccgcactcgagcaccaccaccaccaccac

SEQ ID NO: 1118 - DNA, 304 bp, Homo sapiens
tcctaaagcttggaacactttcccttccttaagaaccatccttgctactcagctgcaatcaatccagcccccaggtcttcactgaaccttttcccatctcttccaaaacatctgtttctgagaagtcctgtcctatagaggtctttcttcccaccggatttctcctacaccatttactcccacttgcagaactcccgtgtacaagtgtctttactgcttttatttgctcatcaaaatgcacatctcatataaaaataaatgaggagcatgcacacaccacaaacacaaacaggcatgcagaaat

SEQ ID NO: 1119 - DNA, 665 bp, Homo sapiens
ataaagatgaacccatagtgagctgagagctccagcctggcctccagataactacacaccaagcttccacccagaatcaagcctatgttaacttccctcaaagcctgagattttgccttcccattaaatgcaggtagttgttccccttcaagcactagtcactggccataatttaaatcttgctatcttcttgccaccatgaaccctgtatgttgtaggctgaagacgttaaaagaaacacacgctgacacacacacacacacgcgcgcgcgcacacacacacacacacacagagctgactttcaaaatctactccagcccaaatgtttcaattgttcctcacccctggacatactttgcccccatctggaattaaaggatataagtttgtaatgaagcattagcagcattttatatgtgtccagctgatataggaatagccttagcaatgtatgtttggccaccaaagttccccactttgactgagccaatatatgccttctgcctgcatctttttaacgaccatacttgtcctgcctccagatagatgttttaaaacaacaaaaatgagggaaagatgaaagttctttctactggaatctaataaagaaaagtcattttcctcatttccacctctcttttctcaaagtcaaaattgtccatct

SEQ ID NO: 1120 - DNA, 165 bp, Homo sapiens
ccctaaaacattaccactgggtctcagcccagttagtcctctgcagtttcttcacccccaaccccagtatcttcaaacagctcacaccctgctgtgctcagatcaatactccgttgtctaagttgcctcgagactaaaggcaacagggctgaaacatctcctgga

SEQ ID NO: 1121 - DNA, 122 bp, Homo sapiens
ctgtgagattgacaagaacagtttgacagtcagaaggtgccacaaatcctgagaagcgacctggacttttgccaggcacagggtccttccttccctcccttgtcctggtcaccagagcctac

SEQ ID NO: 1122 - DNA, 24 bp, Homo sapiens
gccgccggcccctggcctcactgg

SEQ ID NO: 1123 - DNA, 33 bp, Homo sapiens
ccttgtcaaggctattggtcaaggcaaggctgg

SEQ ID NO: 1124 - DNA, 36 bp, Homo sapiens
tgagatagtgtggggaaggggcccccaagaggatac

SEQ ID NO: 1125 - DNA, 41 bp, Homo sapiens
tatagcctttgccttgttccgattcagtcattccagttttt

SEQ ID NO: 1126 - DNA, 114 bp, Homo sapiens
tcttccctttagctagtttccttctcccatcatagaggataccaggacttcttttgtcagccgttttttaccttcttgtctctagctccagtgaggcctgtagtttaaagctaa

SEQ ID NO: 1127 - DNA, 86 bp, Homo sapiens
ccacagtttcagcgcagtaatagattagtgttacataatataagacctaatgcttacctcaatatctacttatccgtacctatttg

SEQ ID NO: 1128 - DNA, 142 bp, Homo sapiens
tattcaggtatgtatgtatacaccagatgatgtgtatttaccactggataagtgtgtgtgctggctgatgacccagggttttggcgtagctcttctatgctcagtaaagatgatggtagaatgttctttggcaggtactgtg

SEQ ID NO: 1129 - DNA, 697 bp, Homo sapiens
caataaagatgaacccatagtgagctgagagctccagcctggcctccagataactacacaccaagcttccacccagaatcaagcctatgttaacttccctcaaagcctgagattttgctttcccattaaatgcaggtagttgttcttcttgcagcactagtcactggccataatttaaatcttgttatcttcttgccaccatgaaccctgtatgctgtaggctgaaaacgttaaaagaaacacacgctctcacacacacacaaacacacgcgcgcacacacacacacacacacacagagctgactttcaaaatctactccagcccaaatgtttcaattgttcctcacccctggacatactttgcccccatctggaattaaaggatataagtttgtaatgaagcattagcagcattttatatgtgtccagctgatataggaatagccttagcaatgtatgtttggccaccaaagttccccactttgactgagccaatatatgccttctgcctgcatctttttaatgaccatacttgtcctgcctccagatagatgttttaaaacgaataacaaaaataggggaaaggtgaaagttctttctaccgaaatctaataaagaaaagtcattttcctcatttccacctctcttttctcaaagtcaaagttgtccatctagattttcagaggcactccttagg

SEQ ID NO: 1130 - DNA, 185 bp, Homo sapiens
ccctaaaacattgccactgggtctcagcccagttagtcctctgcagtttcttcactcccaaccccagtatcttcaaacagctcacaccctgctgtgctcagatcaatactcagttgtctaagttgcctcgagactaaaggcaacagtgctgaaacatctcctggactcaccttgaagttctcagg

SEQ ID NO: 1131 - DNA, 137 bp, Homo sapiens
agcctgtgagattgacaagaacagtttgacagtcagaaggtgccacaaatcctgagaagcgacctggacttttgccaggcacagggtccttccttccctcccttgtcctggtcaccagagcctaccttcccagggtt

SEQ ID NO: 1132 - DNA, 38 bp, Homo sapiens
ccgccggcccctggcctcactggatactctaagactat

SEQ ID NO: 1133 - DNA, 31 bp, Homo sapiens
ccttgtcaaggctattggtcaaggcaaggct

SEQ ID NO: 1134 - DNA, 75 bp, Homo sapiens
cagggaccgtttcagacagatatttgcattgagatagtgtggggaaggggcccccaagaggatactgctgcttaa

SEQ ID NO: 1135 - DNA, 29 bp, Homo sapiens
ttgccttgttccgattcagtcattccaat

SEQ ID NO: 1136 - DNA, 104 bp, Homo sapiens
tttagctagttttcttctcccaccatagaagataccaggacttcttttgtcagccgtttttcaccttcttgtctgtagctccagtgaggcctgtagtttaaagt

SEQ ID NO: 1137 - DNA, 38 bp, Homo sapiens
ggacacgtcttagtctcatttagtaagcattggtttcc

SEQ ID NO: 1138 - DNA, 124 bp, Homo sapiens
ttttttatattcaggtatgtatgtaggcacccgatgatgtgtatttatcactggataagtgtatgtgctggctgatgacccagggttttggtgtagctcttctatgctcggtaaagatgatggt

SEQ ID NO: 1139 - RNA, 20 nt, Artificial Sequence
  gRNA targeting domain - AsCpf1 HBG1 Promoter-1
agacagauauuugcauugag

SEQ ID NO: 1140 - DNA, 20 bp, Artificial Sequence
  gRNA targeting domain - AsCpf1 HBG1 Promoter-1
agacagatatttgcattgag

SEQ ID NO: 1141 - RNA, 20 nt, Artificial Sequence
  gRNA targeting domain - AsCpf1 HBG1 Promoter-2
cauugagauaguguggggaa

SEQ ID NO: 1142 - DNA, 20 bp, Artificial Sequence
  gRNA targeting domain - AsCpf1 HBG1 Promoter-2
cattgagatagtgtggggaa

SEQ ID NO: 1143 - RNA, 20 nt, Artificial Sequence
  gRNA targeting domain - AsCpf1 HBG1 Promoter-3
uagccuuugccuuguuccga

SEQ ID NO: 1144 - DNA, 20 bp, Artificial Sequence
  gRNA targeting domain - AsCpf1 HBG1 Promoter-3
tagcctttgccttgttccga

SEQ ID NO: 1145 - RNA, 20 nt, Artificial Sequence
  gRNA targeting domain - AsCpf1 HBG1 Promoter-4
ccuuguuccgauucagucau

SEQ ID NO: 1146 - DNA, 20 bp, Artificial Sequence
  gRNA targeting domain - AsCpf1 HBG1 Promoter-4
ccttgttccgattcagtcat

SEQ ID NO: 1147 - RNA, 20 nt, Artificial Sequence
  gRNA targeting domain - AsCpf1 HBG1 Promoter-5
ucuaauuuauucuucccuuu

SEQ ID NO: 1148 - DNA, 20 bp, Artificial Sequence
  gRNA targeting domain - AsCpf1 HBG1 Promoter-5
tctaatttattcttcccttt

SEQ ID NO: 1149 - RNA, 20 nt, Artificial Sequence
  gRNA targeting domain - AsCpf1 HBG1 Promoter-6
cuucucccaucauagaggau

SEQ ID NO: 1150 - DNA, 20 bp, Artificial Sequence
  gRNA targeting domain - AsCpf1 HBG1 Promoter-6
cttctcccatcatagaggat

SEQ ID NO: 1151 - RNA, 20 nt, Artificial Sequence
  gRNA targeting domain - AsCpf1 HBG2 Promoter-7
uucucccaccauagaagaua

SEQ ID NO: 1152 - DNA, 20 bp, Artificial Sequence
  gRNA targeting domain - AsCpf1 HBG2 Promoter-7
ttctcccaccatagaagata

SEQ ID NO: 1153 - RNA, 20 nt, Artificial Sequence
  gRNA targeting domain - AsCpf1 HBG1 Promoter-8
ccacuggauaagugugugug

SEQ ID NO: 1154 - DNA, 20 bp, Artificial Sequence
  gRNA targeting domain - AsCpf1 HBG1 Promoter-8
ccactggataagtgtgtgtg

SEQ ID NO: 1155 - RNA, 20 nt, Artificial Sequence
  gRNA targeting domain - AsCpf1 HBG1 Promoter-9
gcguagcucuucuaugcuca

SEQ ID NO: 1156 - DNA, 20 bp, Artificial Sequence
  gRNA targeting domain - AsCpf1 HBG1 Promoter-9
gcgtagctcttctatgctca

SEQ ID NO: 1157 - RNA, 20 nt, Artificial Sequence
  gRNA targeting domain - AsCpf1 HBG1 Promoter-10
cugagcauagaagagcuacg

SEQ ID NO: 1158 - DNA, 20 bp, Artificial Sequence
  gRNA targeting domain - AsCpf1 HBG1 Promoter-10
ctgagcatagaagagctacg

SEQ ID NO: 1159 - RNA, 20 nt, Artificial Sequence
  gRNA targeting domain - AsCpf1 HBG2 Promoter-11
ucacuggauaaguguaugug

SEQ ID NO: 1160 - DNA, 20 bp, Artificial Sequence
  gRNA targeting domain - AsCpf1 HBG2 Promoter-11
tcactggataagtgtatgtg

SEQ ID NO: 1161 - RNA, 20 nt, Artificial Sequence
  gRNA targeting domain - AsCpf1 HBG2 Promoter-12
guguagcucuucuaugcucg

SEQ ID NO: 1162 - DNA, 20 bp, Artificial Sequence
  gRNA targeting domain - AsCpf1 HBG2 Promoter-12
gtgtagctcttctatgctcg

SEQ ID NO: 1163 - RNA, 20 nt, Artificial Sequence
  gRNA targeting domain - AsCpf1 HBG2 Promoter-13
ccgagcauagaagagcuaca

SEQ ID NO: 1164 - DNA, 20 bp, Artificial Sequence
  gRNA targeting domain - AsCpf1 HBG2 Promoter-13
ccgagcatagaagagctaca

SEQ ID NO: 1165-1166 - skipped (2 entries)

SEQ ID NO: 1167 - RNA, 20 nt, Artificial Sequence
  gRNA targeting domain - AsCpf1 RR HBG1 Promoter-1
gacagauauuugcauugaga

SEQ ID NO: 1168 - DNA, 20 bp, Artificial Sequence
  gRNA targeting domain - AsCpf1 RR HBG1 Promoter-1
gacagatatttgcattgaga

SEQ ID NO: 1169 - RNA, 20 nt, Artificial Sequence
  gRNA targeting domain - AsCpf1 RR HBG1 Promoter-2
acacuaucucaaugcaaaua

SEQ ID NO: 1170 - DNA, 20 bp, Artificial Sequence
  gRNA targeting domain - AsCpf1 RR HBG1 Promoter-2
acactatctcaatgcaaata

SEQ ID NO: 1171 - RNA, 20 nt, Artificial Sequence
  gRNA targeting domain - AsCpf1 RR HBG1 Promoter-3
cacacuaucucaaugcaaau

SEQ ID NO: 1172 - DNA, 20 bp, Artificial Sequence
  gRNA targeting domain - AsCpf1 RR HBG1 Promoter-3
cacactatctcaatgcaaat

SEQ ID NO: 1173 - RNA, 20 nt, Artificial Sequence
  gRNA targeting domain - AsCpf1 RR HBG1 Promoter-4
ccacacuaucucaaugcaaa

SEQ ID NO: 1174 - DNA, 20 bp, Artificial Sequence
  gRNA targeting domain - AsCpf1 RR HBG1 Promoter-4
ccacactatctcaatgcaaa

SEQ ID NO: 1175 - RNA, 20 nt, Artificial Sequence
  gRNA targeting domain - AsCpf1 RR HBG1 Promoter-5
uuccccacacuaucucaaug

SEQ ID NO: 1176 - DNA, 20 bp, Artificial Sequence
  gRNA targeting domain - AsCpf1 RR HBG1 Promoter-5
ttccccacactatctcaatg

SEQ ID NO: 1177 - RNA, 20 nt, Artificial Sequence
  gRNA targeting domain - AsCpf1 RR HBG1 Promoter-6
gauucagucauuccaguuuu

SEQ ID NO: 1178 - DNA, 20 bp, Artificial Sequence
  gRNA targeting domain - AsCpf1 RR HBG1 Promoter-6
gattcagtcattccagtttt

SEQ ID NO: 1179 - RNA, 20 nt, Artificial Sequence
  gRNA targeting domain - AsCpf1 RR HBG1 Promoter-7
auucagucauuccaguuuuu

SEQ ID NO: 1180 - DNA, 20 bp, Artificial Sequence
  gRNA targeting domain - AsCpf1 RR HBG1 Promoter-7
attcagtcattccagttttt

SEQ ID NO: 1181 - RNA, 20 nt, Artificial Sequence
  gRNA targeting domain - AsCpf1 RR HBG1 Promoter-8
gucauuccaguuuuucucua

SEQ ID NO: 1182 - DNA, 20 bp, Artificial Sequence
  gRNA targeting domain - AsCpf1 RR HBG1 Promoter-8
gtcattccagtttttctcta

SEQ ID NO: 1183 - RNA, 20 nt, Artificial Sequence
  gRNA targeting domain - AsCpf1 RR HBG1 Promoter-9
aguuuuucucuaauuuauuc

SEQ ID NO: 1184 - DNA, 20 bp, Artificial Sequence
  gRNA targeting domain - AsCpf1 RR HBG1 Promoter-9
agtttttctctaatttattc

SEQ ID NO: 1185 - RNA, 20 nt, Artificial Sequence
  gRNA targeting domain - AsCpf1 RR HBG1 Promoter-10
guuuuucucuaauuuauucu

SEQ ID NO: 1186 - DNA, 20 bp, Artificial Sequence
  gRNA targeting domain - AsCpf1 RR HBG1 Promoter-10
gtttttctctaatttattct

SEQ ID NO: 1187 - RNA, 20 nt, Artificial Sequence
  gRNA targeting domain - AsCpf1 RR HBG2 Promoter-11
gauucagucauuccaauuuu

SEQ ID NO: 1188 - DNA, 20 bp, Artificial Sequence
  gRNA targeting domain - AsCpf1 RR HBG2 Promoter-11
caagaggatactgctgctta

SEQ ID NO: 1189 - RNA, 20 nt, Artificial Sequence
  gRNA targeting domain - AsCpf1 RR HBG2 Promoter-12
auucagucauuccaauuuuu

SEQ ID NO: 1190 - DNA, 20 bp, Artificial Sequence
  gRNA targeting domain - AsCpf1 RR HBG2 Promoter-12
aagaggatactgctgcttaa

SEQ ID NO: 1191 - RNA, 20 nt, Artificial Sequence
  gRNA targeting domain - AsCpf1 RR HBG2 Promoter-13
gucauuccaauuuuucucua

SEQ ID NO: 1192 - DNA, 20 bp, Artificial Sequence
  gRNA targeting domain - AsCpf1 RR HBG2 Promoter-13
gattcagtcattccaatttt

SEQ ID NO: 1193 - RNA, 20 nt, Artificial Sequence
  gRNA targeting domain - AsCpf1 RR HBG2 Promoter-14
aauuuuucucuaauuuauuc

SEQ ID NO: 1194 - DNA, 20 bp, Artificial Sequence
  gRNA targeting domain - AsCpf1 RR HBG2 Promoter-14
attcagtcattccaattttt

SEQ ID NO: 1195 - RNA, 20 nt, Artificial Sequence
  gRNA targeting domain - AsCpf1 RR HBG2 Promoter-15
auuuuucucuaauuuauucu

SEQ ID NO: 1196 - DNA, 20 bp, Artificial Sequence
  gRNA targeting domain - AsCpf1 RR HBG2 Promoter-15
gtcattccaatttttctcta

SEQ ID NO: 1197 - RNA, 20 nt, Artificial Sequence
  gRNA targeting domain - AsCpf1 RR HBG2 Promoter-16
uucucccaucauagaggaua

SEQ ID NO: 1198 - DNA, 20 bp, Artificial Sequence
  gRNA targeting domain - AsCpf1 RR HBG2 Promoter-16
aatttttctctaatttattc

SEQ ID NO: 1199 - RNA, 20 nt, Artificial Sequence
  gRNA targeting domain - AsCpf1 RR HBG2 Promoter-17
aucauagaggauaccaggac

SEQ ID NO: 1200 - DNA, 20 bp, Artificial Sequence
  gRNA targeting domain - AsCpf1 RR HBG2 Promoter-17
atttttctctaatttattct

SEQ ID NO: 1201 - RNA, 20 nt, Artificial Sequence
  gRNA targeting domain - AsCpf1 RR HBG1 Promoter-18
accauagaagauaccaggac

SEQ ID NO: 1202 - DNA, 20 bp, Artificial Sequence
  gRNA targeting domain - AsCpf1 RR HBG1 Promoter-18
ttctcccatcatagaggata

SEQ ID NO: 1203 - RNA, 20 nt, Artificial Sequence
  gRNA targeting domain - AsCpf1 RR HBG1 Promoter-19
caguaccugccaaagaacau

SEQ ID NO: 1204 - DNA, 20 bp, Artificial Sequence
  gRNA targeting domain - AsCpf1 RR HBG1 Promoter-19
atcatagaggataccaggac

SEQ ID NO: 1205 - RNA, 20 nt, Artificial Sequence
  gRNA targeting domain - AsCpf1 RR HBG2 Promoter-20
uaguaucugguaaagagcau

SEQ ID NO: 1206 - DNA, 20 bp, Artificial Sequence
  gRNA targeting domain - AsCpf1 RR HBG2 Promoter-20
accatagaagataccaggac

SEQ ID NO: 1207 - RNA, 20 nt, Artificial Sequence
  gRNA targeting domain - AsCpf1 RR HBG1 Promoter-21
ucaaugcaaauaucugucug

SEQ ID NO: 1208 - DNA, 20 bp, Artificial Sequence
  gRNA targeting domain - AsCpf1 RR HBG1 Promoter-21
cagtacctgccaaagaacat

SEQ ID NO: 1209 - RNA, 20 nt, Artificial Sequence
  gRNA targeting domain - AsCpf1 RR HBG2 Promoter-22
cucuugggggccccuucccc

SEQ ID NO: 1210 - DNA, 20 bp, Artificial Sequence
  gRNA targeting domain - AsCpf1 RR HBG2 Promoter-22
tagtatctggtaaagagcat

SEQ ID NO: 1211 - RNA, 20 nt, Artificial Sequence
  gRNA targeting domain - AsCpf1 RVR HBG1 Promoter-1
gauucagucauuccaauuuu

SEQ ID NO: 1212 - DNA, 20 bp, Artificial Sequence
  gRNA targeting domain - AsCpf1 RVR HBG1 Promoter-1
tcaatgcaaatatctgtctg

SEQ ID NO: 1213 - RNA, 20 nt, Artificial Sequence
  gRNA targeting domain - AsCpf1 RVR HBG1 Promoter-2
auucagucauuccaauuuuu

SEQ ID NO: 1214 - DNA, 20 bp, Artificial Sequence
  gRNA targeting domain - AsCpf1 RVR HBG1 Promoter-2
ctcttgggggccccttcccc

SEQ ID NO: 1215 - RNA, 20 nt, Artificial Sequence
  gRNA targeting domain - AsCpf1 RVR HBG1 Promoter-3
aaaaaaauuagcaguauccu

SEQ ID NO: 1216 - DNA, 20 bp, Artificial Sequence
  gRNA targeting domain - AsCpf1 RVR HBG1 Promoter-3
aaaaaaattagcagtatcct

SEQ ID NO: 1217 - RNA, 20 nt, Artificial Sequence
  gRNA targeting domain - AsCpf1 RVR HBG1 Promoter-4
gccuuugccuuguuccgauu

SEQ ID NO: 1218 - DNA, 20 bp, Artificial Sequence
  gRNA targeting domain - AsCpf1 RVR HBG1 Promoter-4
gcctttgccttgttccgatt

SEQ ID NO: 1219 - RNA, 20 nt, Artificial Sequence
  gRNA targeting domain - AsCpf1 RVR HBG2 Promoter-5
aaaaaaauuaagcagcagua

SEQ ID NO: 1220 - DNA, 20 bp, Artificial Sequence
  gRNA targeting domain - AsCpf1 RVR HBG2 Promoter-5
aaaaaaattaagcagcagta

SEQ ID NO: 1221 - RNA, 20 nt, Artificial Sequence
  gRNA targeting domain - AsCpf1 RVR HBG1 Promoter-6
cucaguaaagaugaugguag

SEQ ID NO: 1222 - DNA, 20 bp, Artificial Sequence
  gRNA targeting domain - AsCpf1 RVR HBG1 Promoter-6
ctcagtaaagatgatggtag

SEQ ID NO: 1223 - RNA, 20 nt, Artificial Sequence
  gRNA targeting domain - AsCpf1 RVR HBG2 Promoter-7
acuggauaaguguaugugcu

SEQ ID NO: 1224 - DNA, 20 bp, Artificial Sequence
  gRNA targeting domain - AsCpf1 RVR HBG2 Promoter-7
actggataagtgtatgtgct

SEQ ID NO: 1225 - RNA, 20 nt, Artificial Sequence
  gRNA targeting domain - AsCpf1 RVR HBG2 Promoter-8
ugcuggcugaugacccaggg

SEQ ID NO: 1226 - DNA, 20 bp, Artificial Sequence
  gRNA targeting domain - AsCpf1 RVR HBG2 Promoter-8
tgctggctgatgacccaggg

SEQ ID NO: 1227 - RNA, 20 nt, Artificial Sequence
  gRNA targeting domain - AsCpf1 RVR HBG2 Promoter-9
cucgguaaagaugaugguag

SEQ ID NO: 1228 - DNA, 20 bp, Artificial Sequence
  gRNA targeting domain - AsCpf1 RVR HBG2 Promoter-9
ctcggtaaagatgatggtag

SEQ ID NO: 1229 - RNA, 20 nt, Artificial Sequence
  gRNA targeting domain - AsCpf1 RVR HBG2 Promoter-10
ugguaaagagcauucuacca

SEQ ID NO: 1230 - DNA, 20 bp, Artificial Sequence
  gRNA targeting domain - AsCpf1 RVR HBG2 Promoter-10
tggtaaagagcattctacca

SEQ ID NO: 1231 - RNA, 5 nt, Artificial Sequence
  +5 RNA gRNA 5' extension
cuuuu

SEQ ID NO: 1232 - RNA, 10 nt, Artificial Sequence
  +10 RNA gRNA 5' extension
aagaccuuuu

SEQ ID NO: 1233 - RNA, 25 nt, Artificial Sequence
  +25 RNA gRNA 5' extension
auguguuuuugucaaaagaccuuuu

SEQ ID NO: 1234 - RNA, 60 nt, Artificial Sequence
  +60 RNA gRNA 5' extension
aggccagcuugccgguuuuuuagucgugcugcuucauguguuuuugucaaaagaccuuuu

SEQ ID NO: 1235 - DNA, 5 bp, Artificial Sequence
  +5 DNA gRNA 5' extension
ctttt

SEQ ID NO: 1236 - DNA, 10 bp, Artificial Sequence
  +10 DNA gRNA 5' extension
aagacctttt

SEQ ID NO: 1237 - DNA, 25 bp, Artificial Sequence
  +25 DNA gRNA 5' extension
atgtgtttttgtcaaaagacctttt

SEQ ID NO: 1238 - DNA, 60 bp, Artificial Sequence
  +60 DNA gRNA 5' extension
aggccagcttgccggttttttagtcgtgctgcttcatgtgtttttgtcaaaagacctttt

SEQ ID NO: 1239 - DNA, 20 bp, Artificial Sequence
  +20 DNA gRNA 5' extension
tttttgtcaaaagacctttt

SEQ ID NO: 1240 - DNA, 30 bp, Artificial Sequence
  +30 DNA gRNA 5' extension
gcttcatgtgtttttgtcaaaagacctttt

SEQ ID NO: 1241 - DNA, 50 bp, Artificial Sequence
  +50 DNA gRNA 5' extension
gccggttttttagtcgtgctgcttcatgtgtttttgtcaaaagacctttt

SEQ ID NO: 1242 - DNA, 40 bp, Artificial Sequence
  +40 DNA gRNA 5' extension
tagtcgtgctgcttcatgtgtttttgtcaaaagacctttt

SEQ ID NO: 1243 - DNA, 20 bp, Artificial Sequence
  +20 DNA/2xPS gRNA 5' extension
  misc_feature (1)..(2): Linked by phosphorothioate (PS) bond
  misc_feature (2)..(3): Linked by phosphorothioate (PS) bond
ccgaagttttcttcggtttt

SEQ ID NO: 1244 - DNA, 25 bp, Artificial Sequence
  +25 DNA/2xPS gRNA 5' extension
  misc_feature (1)..(2): Linked by phosphorothioate (PS) bond
  misc_feature (2)..(3): Linked by phosphorothioate (PS) bond
tttttccgaagttttcttcggtttt

SEQ ID NO: 1245 - DNA, 30 bp, Artificial Sequence
  +30 DNA/2xPS gRNA 5' extension
  misc_feature (1)..(2): Linked by phosphorothioate (PS) bond
  misc_feature (2)..(3): Linked by phosphorothioate (PS) bond
aacgctttttccgaagttttcttcggtttt

SEQ ID NO: 1246 - DNA, 41 bp, Artificial Sequence
  +41 DNA/2xPS gRNA 5' extension
  misc_feature (1)..(2): Linked by phosphorothioate (PS) bond
  misc_feature (2)..(3): Linked by phosphorothioate (PS) bond
gcgttgttttcaacgctttttccgaagttttcttcggtttt

SEQ ID NO: 1247 - DNA, 62 bp, Artificial Sequence
  +62 DNA/2xPS gRNA 5' extension
  misc_feature (1)..(2): Linked by phosphorothioate (PS) bond
  misc_feature (2)..(3): Linked by phosphorothioate (PS) bond
ggcttcttttgaagcctttttgcgttgttttcaacgctttttccgaagttttcttcggtttt

SEQ ID NO: 1248 - DNA, 25 bp, Artificial Sequence
  +25 DNA/2xPS gRNA 5' extension
  misc_feature (1)..(2): Linked by phosphorothioate (PS) bond
  misc_feature (2)..(3): Linked by phosphorothioate (PS) bond
atgtgtttttgtcaaaagacctttt

SEQ ID NO: 1249 - DNA, 25 bp, Artificial Sequence
  +25 A gRNA 5' extension
aaaaaaaaaaaaaaaaaaaaaaaaa

SEQ ID NO: 1250 - DNA, 25 bp, Artificial Sequence
  +25 T gRNA 5' extension
ttttttttttttttttttttttttt

SEQ ID NO: 1251 - RNA, 25 nt, Artificial Sequence
  +25 RNA/2xPS gRNA 5' extension
  misc_feature (1)..(2): Linked by phosphorothioate (PS) bond
  misc_feature (1)..(1): Modified to contain 2'-O-methyl
  misc_feature (2)..(2): Modified to contain 2'-O-methyl
  misc_feature (2)..(3): Linked by phosphorothioate (PS) bond
auguguuuuugucaaaagaccuuuu

SEQ ID NO: 1252 - RNA, 25 nt, Artificial Sequence
  +25 polyA RNA/2xPS gRNA 5' extension
  misc_feature (1)..(2): Linked by phosphorothioate (PS) bond
  misc_feature (1)..(1): Modified to contain 2'-O-methyl
  misc_feature (2)..(2): Modified to contain 2'-O-methyl
  misc_feature (2)..(3): Linked by phosphorothioate (PS) bond
aaaaaaaaaaaaaaaaaaaaaaaaa

SEQ ID NO: 1253 - RNA, 25 nt, Artificial Sequence
  +25 polyU RNA/2xPS gRNA 5' extension
  misc_feature (1)..(2): Linked by phosphorothioate (PS) bond
  misc_feature (1)..(1): Modified to contain 2'-O-methyl
  misc_feature (2)..(2): Modified to contain 2'-O-methyl
  misc_feature (2)..(3): Linked by phosphorothioate (PS) bond
uuuuuuuuuuuuuuuuuuuuuuuuu

SEQ ID NO: 1254 - RNA, 21 nt, Artificial Sequence
  HBG1-1 21mer targeting domain
ccuugucaaggcuauugguca

SEQ ID NO: 1255 - DNA, 21 bp, Artificial Sequence
  HBG1-1 21mer targeting domain
ccttgtcaaggctattggtca

SEQ ID NO: 1256 - RNA, 22 nt, Artificial Sequence
  HBG1-1 22mer targeting domain
ccuugucaaggcuauuggucaa

SEQ ID NO: 1257 - DNA, 22 bp, Artificial Sequence
  HBG1-1 22mer targeting domain
ccttgtcaaggctattggtcaa

SEQ ID NO: 1258 - RNA, 23 nt, Artificial Sequence
  HBG1-1 23mer targeting domain
ccuugucaaggcuauuggucaag

SEQ ID NO: 1259 - DNA, 23 bp, Artificial Sequence
  HBG1-1 23mer targeting domain
ccttgtcaaggctattggtcaag

SEQ ID NO: 1260 - RNA, 21 nt, Artificial Sequence
  AsCpf1 HBG1 promoter-1 21mer targeting domain
agacagauauuugcauugaga

SEQ ID NO: 1261 - DNA, 21 bp, Artificial Sequence
  AsCpf1 HBG1 promoter-1 21mer targeting domain
agacagatatttgcattgaga

SEQ ID NO: 1262 - RNA, 21 nt, Artificial Sequence
  AsCpf1 HBG1 promoter-2 21mer targeting domain
cauugagauaguguggggaag

SEQ ID NO: 1263 - DNA, 21 bp, Artificial Sequence
  AsCpf1 HBG1 promoter-2 21mer targeting domain
cattgagatagtgtggggaag

SEQ ID NO: 1264 - RNA, 21 nt, Artificial Sequence
  AsCpf1 HBG1 promoter-6 21mer targeting domain
cuucucccaucauagaggaua

SEQ ID NO: 1265 - DNA, 21 bp, Artificial Sequence
  AsCpf1 HBG1 promoter-6 21mer targeting domain
cttctcccatcatagaggata

SEQ ID NO: 1266 - DNA, 20 bp, Artificial Sequence
  Forward primer
catggcgtctggactaggag

SEQ ID NO: 1267 - DNA, 24 bp, Artificial Sequence
  Reverse primer
aaacacatttcacaatccctgaac

SEQ ID NO: 1268 - DNA, 53 bp, Artificial Sequence
  OLI13753 forward primer
acactctttccctacacgacgctcttccgatctcatggcgtctggactaggag

SEQ ID NO: 1269 - DNA, 58 bp, Artificial Sequence
  OLI13752 reverse primer
gtgactggagttcagacgtgtgctcttccgatctaaacacatttcacaatccctgaac

SEQ ID NO: 1270 - DNA, 499 bp, Artificial Sequence
  AMP3322
catggcgtctggactaggagcttattgataacctcagacgttccagaagcgagtgtgtggaactgctgaagggtgcttccttttattcttcatccctagccagccgccggcccctggcctcactggatactctaagactattggtcaagtttgccttgtcaaggctattggtcaaggcaaggctggccaacccatgggtggagtttagccagggaccgtttcagacagatatttgcattgagatagtgtggggaaggggcccccaagaggatactgctaattttttttatagcctttgccttgttccgattcagtcattccagtttttctctaatttattcttccctttagctagtttccttctcccatcatagaggataccaggacttcttttgtcagccgttttttaccttcttgtctctagctccagtgaggcctgtagtttaaagctaaagcatgtaccaatttttgaaaagttcagggattgtgaaatgtgttt

SEQ ID NO: 1271 - DNA, 25 bp, Artificial Sequence
  AD-P-6 ddPCR Assay6
tccctgatgaacatagatgccaaca

SEQ ID NO: 1272 - DNA, 21 bp, Artificial Sequence
  AD33 ddPCT Assay6
actgggaaagaacataaccaa

SEQ ID NO: 1273 - DNA, 22 bp, Artificial Sequence
  AD34 ddPCT Assay6
gatatgctgtcggatgctatta

SEQ ID NO: 1274 - DNA, 26 bp, Artificial Sequence
  AD-P-9 ddPCT Assay9
agaatgttctttggcaggtactgtgg

SEQ ID NO: 1275 - DNA, 20 bp, Artificial Sequence
  AD95 ddPCT Assay9
cgtagctcttctatgctcag

SEQ ID NO: 1276 - DNA, 18 bp, Artificial Sequence
  AD96 ddPCT Assay9
ccatgtacacgcacatct
